(19) United States
(12) Patent Application Publication
(10) Pub. No.: US 2024/0228988 A1
(43) Pub. Date: Jul. 11, 2024

(54) COMPOSITIONS AND METHODS FOR EFFICIENT GENOME EDITING

(71) Applicant: PRIME MEDICINE, INC., Cambridge, MA (US)

(72) Inventors: Holly A. Rees, Cambridge, MA (US); Michael Packer, Cambridge, MA (US); Luis Barrera, Cambridge, MA (US); Ian Slaymaker, Cambridge, MA (US)

(21) Appl. No.: 18/404,456

(22) Filed: Jan. 4, 2024

Related U.S. Application Data
(63) Continuation of application No. PCT/US2022/035613, filed on Jun. 29, 2022.
(60) Provisional application No. 63/219,623, filed on Jul. 8, 2021.
(60) Provisional application No. 63/218,744, filed on Jul. 6, 2021.

(51) Int. Cl. C12N 9/12; C12N 9/22; C12N 15/62

(52) U.S. Cl. CPC C12N 9/1276; C12N 9/22; C12N 15/62; C07K 2319/80; C12N 2310/20

(57) ABSTRACT

Provided herein are improved prime editing methods and compositions that allow for efficient and precise editing of target genes.

### CROSS-REFERENCE

[0001] This application is a continuation of International Application No. PCT/US2022/035613, filed on Jun. 29, 2022, which claims the benefit of U.S. Provisional Application No. 63/218,744, filed Jul. 6, 2021 and U.S. Provisional Application No. 63/219,623, filed Jul. 8, 2021, each of which applications are incorporated herein by reference in their entirety.

### SEQUENCE LISTING

[0002] The instant application contains a Sequence Listing which has been submitted electronically in XML format and is hereby incorporated by reference in its entirety. Said XML copy, created on Jan. 3, 2024, is named 59761-740_301_SL.xml and is 2,667,105 bytes in size.

### BACKGROUND

[0003] Prime editing technology is a gene editing technology that can make targeted insertions, deletions, and all transversion and transition point mutations in a target genome. This disclosure provides improved prime editing methods and compositions that allow for efficient and precise editing of target genes.

### SUMMARY OF THE INVENTION

[0004] Provided herein, in some embodiments, are methods and compositions for efficient prime editing of alterations in a target sequence in a target DNA, e.g., a target gene.

[0005] Without wishing to be bound by any particular theory, the prime editing process may search and replace endogenous sequences in a target polynucleotide. As exemplified in FIG. 3, the spacer sequence of a prime editing guide RNA (PEgRNA) recognizes and anneals with a search target sequence in a target strand of a double stranded target polynucleotide, e.g., a double stranded target DNA. A prime editing complex may generate a nick in the target DNA on the edit strand which is the complementary strand of the target strand. The prime editing complex may then use a free 3′ end formed at the nick site of the edit strand to initiate DNA synthesis, where a primer binding site sequence (PBS) of the PEgRNA complexes with the free 3′ end, and a single stranded DNA is synthesized using an editing template of the PEgRNA as a template. The editing template may comprise one or more intended nucleotide edits compared to the endogenous double stranded target DNA sequence. Accordingly, the newly synthesized single stranded DNA also comprises the nucleotide edit(s) encoded by the editing template. Through removal of the editing target sequence on the edit strand of the double stranded target DNA and DNA repair mechanism, the newly synthesized single stranded DNA replaces the editing target sequence, and the desired nucleotide edit(s) are incorporated into the double stranded target DNA.

[0006] Provided herein, in some embodiments, are modified prime editor (PE) polypeptides, modified PEgRNAs that can associate with each other and efficiently incorporate intended nucleotide edits in the double stranded target DNA, and methods of using the same for editing target DNA in specific cell types, e.g., hematopoietic stem cells.

[0007] In one aspect, provided herein is a prime editing composition that comprises a fusion protein or a polynucleotide encoding the fusion protein, wherein the fusion protein comprises a DNA binding domain and a DNA polymerase domain connected via a peptide linker, wherein the peptide linker comprises an amino acid sequence with at least 80% identity to a sequence selected from the group consisting of SEQ ID Nos. 289, 291, 293, 294, 295, 301, 302, 303, 306, 309, 310, and 311.

[0008] In one aspect, provided herein is a prime editing composition that comprises a fusion protein or a polynucleotide encoding the fusion protein, wherein the fusion protein comprises a DNA binding domain and a DNA polymerase domain connected via a peptide linker, wherein the peptide linker comprises an amino acid sequence with at least 80% identity to a sequence selected from the group consisting of SEQ ID Nos. 286-411.

[0009] In some embodiments, the amino acid sequence of the peptide linker has at least about 81%, 82%, 83%, 84%, 85%, 86%, 87%, 88%, 80%, 90%, 91%, 92%, 93%, 94%, 95%, 96%, 97%, 98%, 99%, or 100% sequence identity to the selected sequence. In some embodiments, the selected sequence is SEQ ID NO: 302. In some embodiments, the selected sequence is SEQ ID NO: 309.

[0010] In one aspect, provided herein is a prime editing composition that comprises a fusion protein or a polynucleotide encoding the fusion protein, wherein the fusion protein comprises a DNA binding domain and a DNA polymerase domain connected via a peptide linker, wherein the peptide linker comprises at least 4 contiguous SGGS motifs (SEQ ID NO: 305).

[0011] In one aspect, provided herein is a prime editing composition that comprises a fusion protein or a polynucleotide encoding the fusion protein, wherein the fusion protein comprises a DNA binding domain and a DNA polymerase domain connected via a peptide linker, wherein the peptide linker comprises 4 to 10 contiguous SGGS motifs (SEQ ID NO: 301).

[0012] In some embodiments, the peptide linker comprises 4, 5, 6, 8, or 10 contiguous SGGS motifs (SEQ ID NOS 305, 304, 303, 302 and 301, respectively, in order of appearance).

[0013] In one aspect, provided herein is a prime editing composition that comprises a fusion protein or a polynucleotide encoding the fusion protein, wherein the fusion protein comprises a DNA binding domain and a DNA polymerase domain connected via a peptide linker, wherein the peptide linker comprises at least 2 contiguous EAAAK motifs (SEQ ID NO: 649).

[0014] In one aspect, provided herein is a prime editing composition that comprises a fusion protein or a polynucleotide encoding the fusion protein, wherein the fusion protein comprises a DNA binding domain and a DNA polymerase domain connected via a peptide linker, wherein the peptide linker comprises 2 to 8 contiguous EAAAK motifs (SEQ ID NOS 649, 697, 650, 698-700 and 651, respectively, in order of appearance).

[0015] In some embodiments, the peptide linker comprises 2, 3, 4, 6, or 8 contiguous EAAAK motifs (SEQ ID NOS 649, 697, 650, 699 and 651, respectively, in order of appearance). In some embodiments, the DNA polymerase domain comprises a reverse transcriptase (RT) domain. In some embodiments, the RT domain is a Moloney murine leukemia virus (M-MLV) RT domain. In some embodiments, the M-MLV RT domain comprises an amino acid having at least about 80%, 81%, 82%, 83%, 84%, 85%, 86%, 87%, 88%, 89%, 90%, 91%, 92%, 93%, 94%, 95%, 96%, 97%, 98%, 99%, or 100% sequence identity to SEQ ID NO: 5. In some embodiments, the M-MLV RT domain comprises an amino acid sequence that is truncated at C terminus between positions corresponding to amino acids 504 and 505 as set forth in SEQ ID NO: 1. In some embodiments, the M-MLV RT domain comprises an amino acid sequence having at least about 80%, 81%, 82%, 83%, 84%, 85%, 86%, 87%, 88%, 89%, 90%, 91%, 92%, 93%, 94%, 95%, 96%, 97%, 98%, 99%, or 100% sequence identity to SEQ ID NO: 36.

[0016] In some embodiments, the M-MLV RT domain comprises an amino acid sequence that is truncated at C terminus between positions corresponding to amino acids 478 and 479 as set forth in SEQ ID NO: 1. In some embodiments, the M-MLV RT domain comprises an amino acid sequence having at least about 80%, 81%, 82%, 83%, 84%, 85%, 86%, 87%, 88%, 89%, 90%, 91%, 92%, 93%, 94%, 95%, 96%, 97%, 98%, 99%, or 100% sequence identity to SEQ ID NO: 54.

[0017] In one aspect, the present disclosure provides a prime editing composition comprising: a) a DNA binding domain or a polynucleotide encoding the DNA binding domain, and b) a Moloney Murine Leukemia reverse transcriptase (M-MLV RT) domain or a polynucleotide encoding the M-MLV RT domain, wherein the M-MLV RT domain comprises an amino acid sequence that is truncated at C terminus between positions corresponding to amino acids 504 and 505 as set forth in SEQ ID NO: 1.

[0018] In one aspect, provided herein is a prime editing composition comprising a) a DNA binding domain or a polynucleotide encoding the DNA binding domain, and b) a Moloney Murine Leukemia reverse transcriptase (M-MLV RT) domain or a polynucleotide encoding the M-MLV RT domain, wherein the M-MLV RT domain is truncated at C terminus between positions corresponding to amino acids 478 and 479 as set forth in SEQ ID NO: 1.

[0019] In some embodiments, the M-MLV RT domain comprises an amino acid substitution D200N, T306K, W313F, T330P, or any combination thereof as compared to a reference M-MLV RT as set forth in SEQ ID NO: 1. In some embodiments, the DNA binding domain is connected to the M-MLV RT domain in a fusion protein. In some embodiments, the DNA binding domain and the M-MLV RT domain are connected by a peptide linker. In some embodiments, the peptide linker comprises a sequence having at least about 80%, 81%, 82%, 83%, 84%, 85%, 86%, 87%, 88%, 89%, 90%, 91%, 92%, 93%, 94%, 95%, 96%, 97%, 98%, 99%, or 100% sequence identity to a sequence selected from the group consisting of SEQ ID Nos 286-411.

[0020] In some embodiments, the DNA binding domain comprises a CRISPR associated (Cas) protein. In some embodiments, the Cas protein is a Type II Cas protein. In some embodiments, the Cas protein is Cas9. In some embodiments, the Cas9 protein is a nickase that comprises a mutation in a HNH domain. In some embodiments, the Cas9 protein comprises a H840A mutation compared to SEQ ID NO: 2. In some embodiments, the DNA binding domain comprises an amino acid sequence having at least about 80%, 81%, 82%, 83%, 84%, 85%, 86%, 87%, 88%, 89%, 90%, 91%, 92%, 93%, 94%, 95%, 96%, 97%, 98%, 99%, or 100% sequence identity to SEQ ID NO: 7.

[0021] In some embodiments, the Cas protein is a Type V Cas protein. In some embodiments, the Cas protein is a Cas12a, Cas12b, Cas12c, Cas12d, or Cas12e. In some embodiments, the fusion protein comprises the DNA polymerase domain and the DNA binding domain from N-terminus to C-terminus. In some embodiments, the fusion protein comprises the DNA polymerase domain and the DNA binding domain from C-terminus to N-terminus. In some embodiments, the fusion protein comprises an amino acid sequence with at least 80% identity to a sequence selected from the group consisting of SEQ ID Nos 78, 105, 117, 125, 131, 137, 143, 149, 155, 161, 167, 173, 179, 185, 191, 197, 203, 209, 215, 221, and 227. In some embodiments, the selected sequence is SEQ ID NO 78.

[0022] In some embodiments, the selected sequence is SEQ ID NO 105. In some embodiments, the fusion protein comprises an amino acid sequence with at least 80% identity to a sequence selected from the group consisting of SEQ ID Nos 86, 111, 122, 128, 134, 140, 146, 152, 158, 164, 170, 176, 182, 188, 194, 200, 206, 212, 218, 224, and 230. In some embodiments, the selected sequence is SEQ ID NO: 86. In some embodiments, the selected sequence is SEQ ID NO: 111. In some embodiments, the fusion protein comprises an amino acid sequence with at least 80%, 81%, 82%, 83%, 84%, 85%, 86%, 87%, 88%, 80%, 90%, 91%, 92%, 93%, 94%, 95%, 96%, 97%, 98%, 99%, or 100% identity to the selected sequence. In some embodiments, the fusion protein comprises one or more nuclear localization signals (NLSs). In some embodiments, the one or more NLSs comprises an amino acid sequence selected from the group consisting of SEQ ID Nos 8-15 or 621.

[0023] In some embodiments, the fusion protein comprises an amino acid sequence with at least 80% identity to a sequence selected from the group consisting of SEQ ID Nos 77, 93, 104, 116, and 620. In some embodiments, the selected sequence is SEQ ID NO: 77 or SEQ ID NO: 620. In some embodiments, the selected sequence is SEQ ID NO: 93. In some embodiments, the fusion protein comprises an amino acid sequence with at least 80% identity to a sequence selected from the group consisting of SEQ ID Nos 85, 96, 110, and 622. In some embodiments, the selected sequence is SEQ ID NO: 85 or SEQ ID NO: 622.

[0024] In some embodiments, the selected sequence is SEQ ID NO: 110. In some embodiments, the fusion protein comprises an amino acid sequence with at least 80%, 81%, 82%, 83%, 84%, 85%, 86%, 87%, 88%, 80%, 90%, 91%, 92%, 93%, 94%, 95%, 96%, 97%, 98%, 99%, or 100% identity to the selected sequence. In some embodiments, the prime editing composition of any one of aspects above, comprising the polynucleotide encoding the fusion protein, wherein the polynucleotide comprises a sequence having at least about 80%, 81%, 82%, 83%, 84%, 85%, 86%, 87%, 88%, 80%, 90%, 91%, 92%, 93%, 94%, 95%, 96%, 97%, 98%, 99%, or 100% identity to a sequence selected from the group consisting of SEQ ID NOs: 81, 82, 108, 109, 120, 121, 126, 127, 132, 133, 138, 139, 144, 145, 150, 151, 156, 157, 162, 163, 168, 169, 174, 175, 180, 181, 186, 187, 192, 193, 198, 199, 204, 205, 210, 211, 216, 217, 222, 223, 228, and 229.

[0025] In some embodiments, the selected sequence is SEQ ID NO 81 or 82. In some embodiments, the prime editing composition of any one of aspects above, comprising the polynucleotide encoding the fusion protein, wherein the polynucleotide comprises a sequence having at least about 80%, 81%, 82%, 83%, 84%, 85%, 86%, 87%, 88%, 80%, 90%, 91%, 92%, 93%, 94%, 95%, 96%, 97%, 98%, 99%, or 100% identity to a sequence selected from the group consisting of SEQ ID Nos 89, 90, 102, 103, 114, 115, 123, 124, 129, 130, 135, 136, 141, 142, 147, 148, 153, 154, 159, 160, 165, 166, 171, 172, 177, 178, 183, 184, 189, 190, 195, 196, 201, 202, 207, 208, 213, 214, 219, 220, 225, 226, 231, and 232. In some embodiments, the selected sequence is SEQ ID NO 89 or 90.

[0026] In some embodiments, the prime editing composition of any one of aspects above, comprising the polynucleotide encoding the fusion protein, wherein the polynucleotide comprises a sequence having at least about 80%, 81%, 82%, 83%, 84%, 85%, 86%, 87%, 88%, 80%, 90%, 91%, 92%, 93%, 94%, 95%, 96%, 97%, 98%, 99%, or 100% identity to a sequence selected from the group consisting of SEQ ID NOs: 79, 80, 94, 95, 106, 107, 118, and 119. In some embodiments, the prime editing composition of any one of aspects above, comprising the polynucleotide encoding the fusion protein, wherein the polynucleotide comprises a sequence having at least about 80%, 81%, 82%, 83%, 84%, 85%, 86%, 87%, 88%, 80%, 90%, 91%, 92%, 93%, 94%, 95%, 96%, 97%, 98%, 99%, or 100% identity to a sequence selected from the group consisting of SEQ ID NOs: 87, 88, 97, 98, 100, 101, 112, and 113. In some embodiments, the selected sequence is SEQ ID NO 79 or 80. In some embodiments, the selected sequence is SEQ ID NO 87 or 88. In some embodiments, the polynucleotide encoding the fusion protein further comprises a stop codon at the 3′ end.

[0027] In some embodiments, the polynucleotide comprises the sequence of SEQ ID NO 276-279. In some embodiments, the polynucleotide comprises the sequence of SEQ ID NO 282-285. In some embodiments, the prime editing composition further comprising a 5′ untranslated region (UTR) and/or a 3′ UTR. In some embodiments, the polynucleotide comprises the sequence of SEQ ID NO 274, 275, 592, or 593. In some embodiments, the polynucleotide comprises the sequence of SEQ ID NO 280, 281, 594, or 595. In some embodiments, the polynucleotide comprises DNA. In some embodiments, the polynucleotide comprises mRNA. In some embodiments, the prime editing composition further comprises a regulatory element sequence, optionally wherein the regulatory element sequence is a promoter.

[0028] In one aspect, provided herein is a prime editing composition comprising a first polynucleotide encoding a DNA binding domain and a second polynucleotide encoding a DNA polymerase domain, wherein the second polynucleotide comprises a sequence having at least 80% identity to a sequence corresponding to nucleotides 100-2130 of a sequence selected from the group consisting of SEQ ID Nos 412-555.

[0029] In one aspect, provided herein is a prime editing composition comprising a first polynucleotide encoding a DNA binding domain and a second polynucleotide encoding a DNA polymerase domain, wherein the second polynucleotide comprises a sequence having at least 80% identity to SEQ ID No 83 or 84.

[0030] In some embodiments, the second polynucleotide comprises a sequence having at least about 81%, 82%, 83%, 84%, 85%, 86%, 87%, 88%, 80%, 90%, 91%, 92%, 93%, 94%, 95%, 96%, 97%, 98%, 99%, or 100% sequence identity to SEQ ID NO 83 or 84.

[0031] In one aspect, provided herein is a prime editing composition comprising a first polynucleotide encoding a DNA binding domain and a second polynucleotide encoding a DNA polymerase domain, wherein the second polynucleotide comprises the sequence of SEQ ID No 83 or 84.

[0032] In one aspect, provided herein is a prime editing composition comprising a first polynucleotide encoding a DNA binding domain and a second polynucleotide encoding a DNA polymerase domain, wherein the second polynucleotide comprises a sequence having at least 80% identity to SEQ ID No 91 or 92.

[0033] In some embodiments, the second polynucleotide comprises a sequence having at least about 81%, 82%, 83%, 84%, 85%, 86%, 87%, 88%, 80%, 90%, 91%, 92%, 93%, 94%, 95%, 96%, 97%, 98%, 99%, or 100% sequence identity to SEQ ID NO 91 or 92.

[0034] In one aspect, provided herein is a prime editing composition comprising a first polynucleotide encoding a DNA binding domain and a second polynucleotide encoding a DNA polymerase domain, wherein the second polynucleotide comprises the sequence of SEQ ID No 91 or 92.

[0035] In some embodiments, the first polynucleotide encodes a CRISPR associated (Cas) protein. In some embodiments, the Cas protein is a Type II Cas protein. In some embodiments, the Cas protein is Cas9. In some embodiments, the Cas9 protein is a nickase that comprises a mutation in a HNH domain, optionally wherein the Cas9 protein comprises a H840A mutation compared to SEQ ID NO: 2. In some embodiments, the Cas protein is a Type V Cas protein. In some embodiments, the Cas protein is a Cas12a, Cas12b, Cas12c, Cas12d, or Cas12e. In some embodiments, the first polynucleotide and the second polynucleotide are connected in a fusion polynucleotide. In some embodiments, the first polynucleotide and the second polynucleotide are connected by a sequence that encodes a peptide linker. In some embodiments, the polynucleotide encoding the peptide linker comprises the sequence of SEQ ID No 235, 236 or 633-636.

[0036] In some embodiments, the first polynucleotide is connected to the 5′ end of the second polynucleotide. In some embodiments, the first polynucleotide is connected to the 3′ end of the second polynucleotide. In some embodiments, the fusion polynucleotide comprises a sequence having at least about 80%, 81%, 82%, 83%, 84%, 85%, 86%, 87%, 88%, 80%, 90%, 91%, 92%, 93%, 94%, 95%, 96%, 97%, 98%, 99%, or 100% identity to a sequence selected from the group consisting of SEQ ID NOs: 81, 82, 108, 109, 120, 121, 126, 127, 132, 133, 138, 139, 144, 145, 150, 151, 156, 157, 162, 163, 168, 169, 174, 175, 180, 181, 186, 187, 192, 193, 198, 199, 204, 205, 210, 211, 216, 217, 222, 223, 228, 229, 241, and 242. In some embodiments, the selected sequence is SEQ ID NO 81 or 82. In some embodiments, the selected sequence is SEQ ID NO 241 or 242.

[0037] In some embodiments, the fusion polynucleotide comprises a sequence having at least about 80%, 81%, 82%, 83%, 84%, 85%, 86%, 87%, 88%, 80%, 90%, 91%, 92%, 93%, 94%, 95%, 96%, 97%, 98%, 99%, or 100% identity to a sequence selected from the group consisting of SEQ ID Nos 89, 90, 102, 103, 114, 115, 123, 124, 129, 130, 135, 136, 141, 142, 147, 148, 153, 154, 159, 160, 165, 166, 171, 172, 177, 178, 183, 184, 189, 190, 195, 196, 201, 202, 207, 208, 213, 214, 219, 220, 225, 226, 231, and 232. In some embodiments, the selected sequence is SEQ ID NO 89 or 90. In some embodiments, the selected sequence is SEQ ID NO 102 or 103. In some embodiments, the selected sequence is SEQ ID NO 114 or 115. In some embodiments, the first polynucleotide, the second polynucleotide, or both further comprises a sequence encoding a nuclear localization signal (NLS).

[0038] In some embodiments, the NLS comprises the sequence of SEQ ID No 239 or 240 and is connected to the 3′ end of the second polynucleotide. In some embodiments, the fusion polynucleotide comprises a sequence having at least about 80%, 81%, 82%, 83%, 84%, 85%, 86%, 87%, 88%, 80%, 90%, 91%, 92%, 93%, 94%, 95%, 96%, 97%, 98%, 99%, or 100% identity to a sequence selected from the group consisting of SEQ ID NOs: 79, 80, 94, 95, 106, 107, 118, 119, 233, and 234. In some embodiments, the selected sequence is SEQ ID NO: 79 or 80.

[0039] In some embodiments, the fusion polynucleotide comprises a sequence having at least about 80%, 81%, 82%, 83%, 84%, 85%, 86%, 87%, 88%, 80%, 90%, 91%, 92%, 93%, 94%, 95%, 96%, 97%, 98%, 99%, or 100% identity to a sequence selected from the group consisting of SEQ ID NOs: 87, 88, 97, 98, 100, 101, 112, and 113. In some embodiments, the selected sequence is SEQ ID NO: 87 or 88. In some embodiments, the fusion polynucleotide further comprises a stop codon at the 3′ end.

[0040] In some embodiments, the fusion polynucleotide comprises a sequence selected from the group consisting of SEQ ID NO 276-279. In some embodiments, the fusion polynucleotide comprises a sequence selected from the group consisting of SEQ ID NO 282-285. In some embodiments, the fusion polynucleotide comprises a 5′ untranslated region (UTR) and/or a 3′ UTR. In some embodiments, the polynucleotide comprises the sequence of SEQ ID NO 274, 275, 592, or 593. In some embodiments, the polynucleotide comprises the sequence of SEQ ID NO 280, 281, 594, or 595. In some embodiments, the first polynucleotide, the second polynucleotide, and/or the fusion polynucleotide comprises DNA. In some embodiments, the first polynucleotide, the second polynucleotide, and/or the fusion polynucleotide comprises mRNA. In some embodiments, the fusion polynucleotide further comprises a regulatory element sequence, optionally wherein the regulatory element sequence is a promoter.

[0041] In some embodiments, the sequence identities are determined by Needleman-Wunsch alignment of two sequences with Gap Costs set to Existence: 11 Extension: 1 where percent identity is calculated by dividing the number of identities by the length of the alignment. In some embodiments, the prime editing composition further comprises a prime editing guide RNA (PEgRNA) or a polynucleotide encoding the PEgRNA. In some embodiments, the prime editing composition further comprises a nick guide RNA (ngRNA) or a polynucleotide encoding the ngRNA.

[0042] In one aspect, provided herein is a vector comprising one or more of the polynucleotides of the prime editing composition of any one of aspects above.

[0043] In some embodiments, the vector is a AAV vector. In some embodiments, the vector is a lipid nanoparticle (LNP).

[0044] In one aspect, provided herein is a pharmaceutical composition comprising the prime editing composition of any one of aspects above or the vector of any one of aspects above, and a pharmaceutically acceptable excipient.

[0045] In one aspect, provided herein is a method of editing a target gene, the method comprising contacting the target gene with the prime editing composition of any one of aspects above.

[0046] In some embodiments, the target gene is in a cell. In some embodiments, the cell is a human cell. In some embodiments, the cell is a (CD34+) hematopoietic stem cell or a hematopoietic stem progenitor cell. In some embodiments, the contacting is ex vivo. In some embodiments, the cell is in a subject.

### INCORPORATION BY REFERENCE

[0047] All publications, patents, and patent applications mentioned in this specification are herein incorporated by reference to the same extent as if each individual publication, patent, or patent application was specifically and individually indicated to be incorporated by reference.

### BRIEF DESCRIPTION OF THE DRAWINGS

[0048] The novel features of the invention are set forth with particularity in the appended claims. A better understanding of the features and advantages of the present invention will be obtained by reference to the following detailed description that sets forth illustrative embodiments, in which the principles of the invention are utilized, and the accompanying drawings of which:

[0049] FIG. 1 is a schematic representation of an exemplary prime editor fusion protein comprising a Cas9 nickase, a reverse transcriptase, and a linker.

[0050] FIG. 2 depicts a prime editing guide RNA (PEgRNA) architectural overview in an exemplary schematic of PEgRNA designed for a prime editor.

[0051] FIG. 3 depicts a schematic of a prime editing guide RNA (PEgRNA) binding to a double stranded target DNA sequence.

[0052] FIG. 4 is a schematic showing the spacer and gRNA core part of an exemplary guide RNA, in two separate molecules. The rest of the PEgRNA structure is not shown.

[0053] FIG. 5 depicts prime editing efficiency of prime editors having engineered RT domains. “pegRNA only” (top bar for each prime editor) refers to editing efficiency achieved with a pegRNA not paired with a ngRNA; “pegRNA+ngRNA” (bottom bar for each prime editor) refers to editing efficiency achieved with a pegRNA and a ngRNA.

### DETAILED DESCRIPTION OF THE INVENTION

[0054] Provided herein, in some embodiments, are compositions and editing methods for advanced prime editing of target DNA polynucleotides in target cells. Compositions provided herein can comprise prime editors (PEs) that can use engineered guide polynucleotides, e.g., CRISPR-Cas guide RNAs termed prime editing guide RNAs (PEgRNAs) that target PEs to specific DNA loci in the target DNA polynucleotides and can encode DNA edits that can serve a variety of functions, including direct correction of disease-causing mutations.

[0055] The following description and examples illustrate embodiments of the present disclosure in detail. It is to be understood that this disclosure is not limited to the particular embodiments described herein and as such can vary. Those of skill in the art will recognize that there are numerous variations and modifications of this disclosure, which are encompassed within its scope. Although various features of the present disclosure can be described in the context of a single embodiment, the features can also be provided separately or in any suitable combination. Conversely, although the present disclosure can be described herein in the context of separate embodiments for clarity, the present disclosure can also be implemented in a single embodiment.

### Definitions

[0056] Unless defined otherwise, all technical and scientific terms used herein have the same meaning as is commonly understood by one of ordinary skill in the art.

[0057] The terminology used herein is for the purpose of describing particular embodiments only and is not intended to be limiting. As used herein, the singular forms “a”, “an” and “the” are intended to include the plural forms as well, unless the context clearly indicates otherwise. Furthermore, to the extent that the terms “including”, “includes”, “having”, “has”, “with”, or variants thereof as used herein mean “comprising”.

[0058] Unless otherwise specified, the words “comprising”, “comprise”, “comprises”, “having”, “have”, “has”, “including”, “includes”, “include”, “containing”, “contains” and “contain” are inclusive or open-ended and do not exclude additional, unrecited elements or method steps.

[0059] Reference to “some embodiments”, “an embodiment”, “one embodiment”, or “other embodiments” means that a particular feature or characteristic described in connection with the embodiments is included in at least one or more embodiments, but not necessarily all embodiments, of the present disclosure.

[0060] The term “about” or “approximately” means within an acceptable error range for the particular value as determined by one of ordinary skill in the art, which will depend in part on how the value is measured or determined, i.e., the limitations of the measurement system. For example, “about” can mean within 1 standard deviation, per the practice in the art. Alternatively, “about” can mean a range of up to 20%, up to 10%, up to 5%, or up to 1% of a given value. Alternatively, particularly with respect to biological systems or processes, the term can mean within an order of magnitude, preferably within 5-fold, and more preferably within 2-fold, of a value. Where particular values are described in the application and claims, unless otherwise stated, the term “about” meaning within an acceptable error range for the particular value should be assumed.

[0061] As used herein, a “cell” can generally refer to a biological cell. A cell can be the basic structural, functional and/or biological unit of a living organism. A cell can originate from any organism having one or more cells. Some non-limiting examples include: a prokaryotic cell, eukaryotic cell, a bacterial cell, an archaeal cell, a cell of a single-cell eukaryotic organism, a protozoa cell, a cell from a plant, an animal cell, a cell from an invertebrate animal (e.g. fruit fly, cnidarian, echinoderm, nematode, etc.), a cell from a vertebrate animal (e.g., fish, amphibian, reptile, bird, mammal), a cell from a mammal (e.g., a pig, a cow, a goat, a sheep, a rodent, a rat, a mouse, a non-human primate, a human, etc.), et cetera. Sometimes a cell may not originate from a natural organism (e.g., a cell can be synthetically made, sometimes termed an artificial cell).

[0062] In some embodiments, the cell is a mammalian cell. In some embodiments, the cell is a human cell. A cell can be of or derived from different tissues, organs, and/or cell types. In some embodiments, the cell is a primary cell. As used herein, the term “primary cell”, means a cell isolated from an organism, e.g., a mammal, which is grown in tissue culture (i.e., in vitro) for the first time before subdivision and transfer to a subculture. In some embodiments, the cell is a stem cell. In some non-limiting examples, mammalian cells including primary cells and stem cells, can be modified through introduction of one or more polynucleotides, polypeptides, and/or prime editing compositions (e.g., through transfections, transduction, electroporation, and the like) and further passaged. Such modified cells may include hematopoietic stem cells (HSCs), hematopoietic progenitor cells, (HSPCs), hepatocytes, fibroblasts, keratinocytes, epithelial cells (e.g., mammary epithelial cells, intestinal epithelial cells), endothelial cells, glial cells, neural cells, formed elements of the blood (e.g., lymphocytes, bone marrow cells, hematopoietic stem progenitor cells), muscle cells and precursors of these somatic cell types. In some embodiments, the cell is a primary hepatocyte. In some embodiments, the cell is a primary human hepatocyte. In some embodiments, the cell is a stem cell. In some embodiments, the cell is a progenitor cell. In some embodiments, the cell is a pluripotent cell (e.g., a pluripotent stem cell) In some embodiments, the cell (e.g., a stem cell) is an embryonic stem cell, tissue-specific stem cell, mesenchymal stem cell, or an induced pluripotent stem cell. In some embodiments, the cell is an induced pluripotent stem cell (iPSC). In some embodiments, the cell is an embryonic stem cell (ESC). In some embodiments, the cell is a primary human hepatocyte derived from an induced human pluripotent stem cell (iPSC). In some embodiments, the cell is a neuron. In some embodiments, the cell is a neuron from basal ganglia. In some embodiments, the cell is a neuron from basal ganglia of a human subject. In some embodiments, the cell is an epithelial cell from lung, liver, stomach, or intestine. In some embodiments, the cell is an epithelial cell from lung, liver, stomach, or intestine of a human subject. In some embodiments, the cell is a retinal cell. In some embodiments, the cell is a retinal cell from a human subject.

[0063] In some embodiments, the cell is a human stem cell. In some embodiments, the cell is a human pluripotent stem cell. In some embodiments, the cell is a human fibroblast. In some embodiments, the cell is an induced human pluripotent stem cell. In some embodiments, the cell is a human stem cell. In some embodiments, the cell is a human embryonic stem cell.

[0064] In some embodiments, the cell is a CD34+ cell. In some embodiments, the cell is a hematopoietic stem cell (HSC). In some embodiments, the cell is a hematopoietic progenitor cell (HPC). In some embodiments, hematopoietic stem cells and hematopoietic progenitor cells are referred to as hematopoietic stem or progenitor cells (HSPCs). In some embodiments, the cell is a human HSC. In some embodiments, the cell is a human HPC. In some embodiments, the cell is a human HSPC. In some embodiments, the cell is a long term (LT)-HSC. In some embodiments, the cell is a short-term (ST)-HSC. In some embodiments, the cell is a myeloid progenitor cell. In some embodiments, the cell is a lymphoid progenitor cell. In some embodiments, the cell is a granulocyte monocyte progenitor cell. In some embodiments, the cell is a megakaryocyte erythroid progenitor cell. In some embodiments, the cell is a multipotent progenitor cell (MPP).

[0065] In some embodiments, the cell is a stem cell. In some embodiments, the cell is a human stem cell. In some embodiments, the cell is a hematopoietic stem cell (HSC) or a hematopoietic stem and progenitor cell. In some embodiments, the HSC is from bone marrow or mobilized peripheral blood. In some embodiments the human stem cell is an induced pluripotent stem cell (iPSC). In some embodiments, the cell is a human HSC. In some embodiments, the cell is a human CD34+ cell. In some embodiments, the cell is a hematopoietic stem and progenitor cell (HSPC). In some embodiments, the cell is a human hematopoietic stem and progenitor cell (HSPC). In some embodiments, the cell is a hematopoietic progenitor cell, multipotent progenitor cell, lymphoid progenitor cell, a myeloid progenitor cell, a megakaryocyte-erythroid progenitor cell, a granulocyte-megakaryocyte progenitor cell, a granulocyte, a promyelocyte, a neutrophil, an eosinophil, a basophil, an erythrocyte, a reticulocyte, a thrombocyte, a megakaryoblast, a platelet-producing megakaryocyte, a monocyte, a macrophage, a dendritic cell, a microglia, an osteoclast, a lymphocyte, a NK cell, a B-cell, or a T-cell. In some embodiments, the cell edited by prime editing can be differentiated into, or give rise to recovery of a population of cells, e.g., common lymphoid progenitor cells, common myeloid progenitor cells, megakaryocyte-erythroid progenitor cells, granulocyte-megakaryocyte progenitor cells, granulocytes, promyelocytes, neutrophils, eosinophils, basophils, erythrocytes, reticulocytes, thrombocytes, megakaryoblasts, platelet-producing megakaryocytes, platelets, monocytes, macrophages, dendritic cells, microglia, osteoclasts, lymphocytes, such as NK cells, B-cells or T-cells. In some embodiments, the cell edited by prime editing can be differentiated into or give rise to recovery of a population of cells, e.g., neutrophils, platelets, red blood cells, monocytes, macrophages, antigen-presenting cells, microglia, osteoclasts, dendritic cells, inner ear cell, inner ear support cell, cochlear cell and/or lymphocytes. In some embodiments, the cell is in a subject, e.g., a human subject.

[0066] In some embodiments, a cell is not isolated from an organism but forms part of a tissue or organ of an organism, e.g., a mammal. In some non-limiting examples, mammalian cells include formed elements of the blood (e.g., lymphocytes, bone marrow cells), precursors of any of these somatic cell types, and stem cells.

[0067] In some embodiments, a cell is isolated from an organism. In some embodiments, a cell is derived from an organism. In some embodiments, a cell is a differentiated cell. In some embodiments, the cell is a fibroblast. In some embodiments, the cell is differentiated from an induced pluripotent stem cell. In some embodiments, the cell is differentiated from an HSC or an HPSC. In some embodiments, the cell is differentiated from an induced pluripotent stem cell (iPSC). In some embodiments, the cell is differentiated from an embryonic stem cell (ESC).

[0068] In some embodiments, the cell is a differentiated human cell. In some embodiments, cell is a human fibroblast. In some embodiments, the cell is differentiated from an induced human pluripotent stem cell. In some embodiments, the cell is differentiated from a human iPSC or a human ESC.

[0069] In some embodiments, the cell comprises a prime editor, a PEgRNA, or a prime editing composition disclosed herein. In some embodiments, the cell is from a human subject. In some embodiments, the human subject has a disease or condition, or is at a risk of developing a disease or a condition associated with a mutation to be corrected by prime editing. In some embodiments, the cell is from a human subject, and comprises a prime editor or a prime editing composition for correction of the mutation. In some embodiment, the cell comprises a mutation in a double stranded target DNA. In some embodiments, the cell comprises a mutation in a target gene. In some embodiments, the cell comprises a mutation that is associated with a a disease, disorder, or a condition. In some embodiments, the cell is in a human subject. In some embodiments, the cell comprises a prime editor or a prime editing composition for correction of the mutation. In some embodiments, the cell is in a human subject, and comprises a prime editor, a PEgRNA, or a prime editing composition disclosed herein for correction of the mutation. In some embodiments, the cell is from a human subject. In some embodiments, the cell is from a human subject and the mutation has been edited or corrected by prime editing.

[0070] The term “substantially” as used herein can refer to a value approaching 100% of a given value. In some embodiments, the term can refer to an amount that can be at least about 70%, 80%, 90%, 91%, 92%, 93%, 94%, 95%, 96%, 97%, 98%, 99%, 99.9%, or 99.99% of a total amount. In some embodiments, the term can refer to an amount that may be about 100% of a total amount.

[0071] The terms “protein” and “polypeptide” can be used interchangeably to refer to a polymer of two or more amino acids joined by covalent bonds (e.g., an amide bond) that can adopt a three-dimensional conformation. In some embodiments, a protein or polypeptide comprises at least 10 amino acids, 15 amino acids, 20 amino acids, 30 amino acids or 50 amino acids joined by covalent bonds (e.g., amide bonds). In some embodiments, a protein comprises at least two amide bonds. In some embodiments, a protein comprises multiple amide bonds. In some embodiments, a protein comprises at least 10 amide bonds, 15 amide bonds, 20 amide bonds, 30 amide bonds, or 50 amide bonds. In some embodiments, a protein comprises an enzyme, enzyme precursor protein, regulatory protein, structural protein, cytokine, chemokine, growth factor, receptor, nucleic acid binding protein, a biomarker, a member of a specific binding pair (e.g., a ligand or aptamer), or an antibody. In some embodiments, a protein can be a full-length protein (e.g., a fully processed protein having certain biological function). In some embodiments, a protein can be a variant or a fragment of a full-length protein. For example, in some embodiments, a Cas9 protein domain comprises an H840A amino acid substitution compared to a naturally occurring S. pyogenes Cas9 protein. A variant of a protein or enzyme, for example a variant reverse transcriptase, comprises a polypeptide having an amino acid sequence that is about 60% identical, about 70% identical, about 80% identical, about 90% identical, about 95% identical, about 96% identical, about 97% identical, about 98% identical, about 99% identical, about 99.5% identical, or about 99.9% identical to the amino acid sequence of a reference protein.

[0072] In some embodiments, a protein comprises one or more protein domains or subdomains. As used herein, the term “polypeptide domain”, “protein domain”, or “domain” when used in the context of a protein or polypeptide, refers to a polypeptide chain that has one or more biological functions, e.g., a catalytic function, a protein-protein binding function, or a protein-DNA function. In some embodiments, a protein comprises multiple protein domains. In some embodiments, a protein comprises multiple protein domains that are naturally occurring. In some embodiments, a protein comprises multiple protein domains from different naturally occurring proteins. For example, in some embodiments, a prime editor can be a fusion protein comprising a Cas9 protein domain of S. pyogenes or a fragment, mutant, or variant thereof and a reverse transcriptase protein domain of a retrovirus (e.g., Moloney murine leukemia virus) or a mutant, fragment, or variant of the retrovirus. A protein that comprises amino acid sequences from different origins or naturally occurring proteins can be referred to as a fusion, or a chimeric protein.

[0073] In some embodiments, a protein comprises a functional variant or functional fragment of a full-length wild-type protein. A “functional fragment” or “functional portion”, as used herein, refers to any portion of a reference protein (e.g., a wild-type protein) that encompasses less than the entire amino acid sequence of the reference protein while retaining one or more of the functions, e.g., catalytic or binding functions. For example, a functional fragment of a reverse transcriptase can encompass less than the entire amino acid sequence of a wild-type reverse transcriptase but retains the ability under at least one set of conditions to catalyze the polymerization of a polynucleotide. When the reference protein is a fusion of multiple functional domains, a functional fragment thereof can retain one or more of the functions of at least one of the functional domains. For example, a functional fragment of a Cas9 can encompass less than the entire amino acid sequence of a wild-type Cas9 but retains its DNA binding ability and lack its nuclease activity partially or completely.

[0074] A “functional variant” or “functional mutant”, as used herein, refers to any variant or mutant of a reference protein (e.g., a wild-type protein) that encompasses one or more alterations to the amino acid sequence of the reference protein while retaining one or more of the functions, e.g., catalytic or binding functions. In some embodiments, the one or more alterations to the amino acid sequence comprises amino acid substitutions, insertions or deletions, or any combination thereof. In some embodiments, the one or more alterations to the amino acid sequence comprises amino acid substitutions. For example, a functional variant of a reverse transcriptase can comprise one or more amino acid substitutions compared to the amino acid sequence of a wild-type reverse transcriptase but retains the ability under at least one set of conditions to catalyze the polymerization of a polynucleotide. When the reference protein is a fusion of multiple functional domains, a functional variant thereof can retain one or more of the functions of at least one of the functional domains. For example, in some embodiments, a functional fragment of a Cas9 can comprise one or more amino acid substitutions in a nuclease domain, e.g., an H840A amino acid substitution, compared to the amino acid sequence of a wild-type Cas9, but retains the DNA binding ability and lacks the nuclease activity partially or completely.

[0075] The term “function” and its grammatical equivalents as used herein may refer to a capability of operating, having, or serving an intended purpose. Functional can comprise any percent from baseline to 100% of an intended purpose. For example, functional can comprise or comprise about 5%, 10%, 15%, 20%, 25%, 30%, 35%, 40%, 45%, 50%, 55%, 60%, 65%, 70%, 75%, 80%, 85%, 90%, 95%, or up to about 100% of an intended purpose. In some embodiments, the term functional can mean over or over about 100% of normal function, for example, 125%, 150%, 175%, 200%, 250%, 300%, 400%, 500%, 600%, 700% or up to about 1000% of an intended purpose.

[0076] In some embodiments, a protein or polypeptides includes naturally occurring amino acids (e.g., one of the twenty amino acids commonly found in peptides synthesized in nature, and known by the one letter abbreviations A, R, N, C, D, Q, E, G, H, I, L, K, M, F, P, S, T, W, Y and V). In some embodiments, a protein or polypeptides includes non-naturally occurring amino acids (e.g., amino acids which is not one of the twenty amino acids commonly found in peptides synthesized in nature, including synthetic amino acids, amino acid analogs, and amino acid mimetics). In some embodiments, a protein or polypeptide is modified.

[0077] In some embodiments, a protein comprises an isolated polypeptide. The term “isolated” means free or removed to varying degrees from components which normally accompany it as found in the natural state or environment. For example, a polypeptide naturally present in a living animal is not isolated, and the same polypeptide partially or completely separated from the coexisting materials of its natural state is isolated.

[0078] In some embodiments, a protein is present within a cell, a tissue, an organ, or a virus particle. In some embodiments, a protein is present within a cell or a part of a cell (e.g., a bacteria cell, a plant cell, or an animal cell). In some embodiments, the cell is in a tissue, in a subject, or in a cell culture. In some embodiments, the cell is a microorganism (e.g., a bacterium, fungus, protozoan, or virus). In some embodiments, a protein is present in a mixture of analytes (e.g., a lysate). In some embodiments, the protein is present in a lysate from a plurality of cells or from a lysate of a single cell.

[0079] The terms “homologous,” “homology,” or “percent homology” as used herein refer to the degree of sequence identity between an amino acid and a corresponding reference amino acid sequence, or a polynucleotide sequence and a corresponding reference polynucleotide sequence. “Homology” can refer to polymeric sequences, e.g., polypeptide or DNA sequences that are similar. Homology can mean, for example, nucleic acid sequences with at least about: 50%, 55%, 60%, 65%, 70%, 75%, 80%, 81%, 82%, 83%, 84%, 85%, 86%, 87%, 88%, 89%, 90%, 91%, 92%, 93%, 94%, 95%, 96%, 97%, 98%, 99%, or 100% identity. In other embodiments, a “homologous sequence” of nucleic acid sequences can exhibit at least 93%, 95%, 98% or 99% sequence identity to the reference nucleic acid sequence. For example, a “region of homology to a genomic region” can be a region of DNA that has a similar sequence to a given genomic region in the genome. A region of homology can be of any length that is sufficient to promote binding of, e.g., a spacer or a primer binding sitesequence to the genomic region. For example, the region of homology can comprise at least 5, 10, 11, 12, 13, 14, 15, 16, 17, 18, 19, 20, 21, 22, 23, 24, 25, 30, 35, 40, 45, 50, 55, 60, 65, 70, 75, 80, 85, 90, 95, 100, 200, 300, 400, 500, 600, 700, 800, 900, 1000, 1100, 1200, 1300, 1400, 1500, 1600, 1700, 1800, 1900, 2000, 2100, 2200, 2300, 2400, 2500, 2600, 2700, 2800, 2900, 3000, 3100 or more bases in length such that the region of homology has sufficient homology to undergo binding with the corresponding genomic region.

[0080] When a percentage of sequence homology or identity is specified, in the context of two nucleic acid sequences or two polypeptide sequences, the percentage of homology or identity generally refers to the alignment of two or more sequences across a portion of their length when compared and aligned for maximum correspondence. When a position in the compared sequence can be occupied by the same base or amino acid, then the molecules can be homologous at that position. Unless stated otherwise, sequence homology or identity is assessed over the specified length of the nucleic acid, polypeptide or portion thereof. In some embodiments, the homology or identity is assessed over a functional portion or specified portion of the length.

[0081] Alignment of sequences for assessment of sequence homology can be conducted by algorithms known in the art, such as the Basic Local Alignment Search Tool (BLAST) algorithm, which is described in Altschul et al, J. Mol. Biol. 215:403-410, 1990. A publicly available, internet interface, for performing BLAST analyses is accessible through the National Center for Biotechnology Information. Additional known algorithms include those published in: Smith & Waterman, “Comparison of Biosequences”, Adv. Appl. Math. 2:482, 1981; Needleman & Wunsch, “A general method applicable to the search for similarities in the amino acid sequence of two proteins” J. Mol. Biol. 48:443, 1970; Pearson & Lipman “Improved tools for biological sequence comparison”, Proc. Natl. Acad. Sci. USA 85:2444, 1988; or by automated implementation of these or similar algorithms. Global alignment programs can also be used to align similar sequences of roughly equal size. Examples of global alignment programs include NEEDLE (available at www.ebi.ac.uk/Tools/psa/emboss_needle/) which is part of the EMBOSS package (Rice P et al., Trends Genet., 2000; 16: 276-277), and the GGSEARCH program https://fasta.bioch.virginia.edu/fasta_www2/, which is part of the FASTA package (Pearson W and Lipman D, 1988, Proc. Natl. Acad. Sci. USA, 85: 2444-2448). Both of these programs are based on the Needleman-Wunsch algorithm which is used to find the optimum alignment (including gaps) of two sequences along their entire length. A detailed discussion of sequence analysis can also be found in Unit 19.3 of Ausubel et al (“Current Protocols in Molecular Biology” John Wiley & Sons Inc, 1994-1998, Chapter 15, 1998). In some embodiments, an alignment between a query sequence and a reference sequence is performed with Needleman-Wunsch alignment with Gap Costs set to Existence: 11 Extension: 1 where percent identity is calculated by dividing the number of identities by the length of the alignment, as further described in Altschul et al. (“Gapped BLAST and PSI-BLAST: a new generation of protein database search programs”, Nucleic Acids Res. 25:3389-3402, 1997) and Altschul et al, (“Protein database searches using compositionally adjusted substitution matrices”, FEBS J. 272:5101-5109, 2005).

[0082] A skilled person understands that amino acid (or nucleotide) positions may be determined in homologous sequences based on alignment, for example, “H840” in a reference Cas9 sequence may correspond to H839, or another corresponding position in a Cas9 homolog when the Cas9 homolog is aligned against the reference Cas9 sequence. The term “homolog” as used herein refers to a gene or a protein that is related to another gene or protein by a common ancestral DNA sequence. A homolog can be an ortholog or a paralog. An ortholog refers to a gene or protein that is related to another gene or protein by a speciation event. A paralog refers to a gene or protein that is related to another gene or protein by a duplication event within a genome. A paralog may be within the same species of the gene or protein it is related to. A paralog may also be in a different species of the gene or protein it is related to. In some embodiments, an ortholog may retain the same function. In some embodiments, a paralog may evolve a new function.

[0083] The term “polynucleotide” or “nucleic acid molecule” can be any polymeric form of nucleotides, including DNA, RNA, a hybridization thereof, or RNA-DNA chimeric molecules. In some embodiments, a polynucleotide comprises cDNA, genomic DNA, mRNA, tRNA, rRNA, or microRNA. In some embodiments, a polynucleotide is double stranded, e.g., a double-stranded DNA in a gene. In some embodiments, a polynucleotide is single-stranded or substantially single-stranded, e.g., single-stranded DNA or an mRNA. In some embodiments, a polynucleotide is a cell-free nucleic acid molecule. In some embodiments, a polynucleotide circulates in blood. In some embodiments, a polynucleotide is a cellular nucleic acid molecule. In some embodiments, a polynucleotide is a cellular nucleic acid molecule in a cell circulating in blood.

[0084] Polynucleotides can have any three-dimensional structure. The following are nonlimiting examples of polynucleotides: a gene or gene fragment (for example, a probe, primer, EST or SAGE tag), an exon, an intron, intergenic DNA (including, without limitation, heterochromatic DNA), messenger RNA (mRNA), transfer RNA (tRNA), ribosomal RNA (rRNA), a ribozyme, cDNA, a recombinant polynucleotide, a branched polynucleotide, a plasmid, a vector, isolated DNA, isolated RNA, sgRNA, guide RNA, a nucleic acid probe, a primer, an snRNA, a long non-coding RNA, a snoRNA, a siRNA, a miRNA, a tRNA-derived small RNA (tsRNA), an antisense RNA, an shRNA, or a small rDNA-derived RNA (srRNA).

[0085] In some embodiments, a polynucleotide comprises deoxyribonucleotides, ribonucleotides or analogs thereof. In some embodiments, a polynucleotide comprises modified nucleotides, such as methylated nucleotides and nucleotide analogs. If present, modifications to the nucleotide structure can be imparted before or after assembly of the polynucleotide. The sequence of nucleotides can be interrupted by non-nucleotide components. A polynucleotide can be further modified after polymerization, such as by conjugation with a labeling component.

[0086] In some embodiments, a polynucleotide is composed of a specific sequence of four nucleotide bases: adenine (A); cytosine (C); guanine (G); thymine (T); and uracil (U) for thymine when the polynucleotide is RNA. In some embodiments, the polynucleotide can comprise one or more other nucleotide bases, such as inosine (I), which is read by the translation machinery as guanine (G).

[0087] In some embodiments, a polynucleotide can be modified. As used herein, the terms “modified” or “modification” refers to chemical modification with respect to the A, C, G, T and U nucleotides. In some embodiments, modifications can be on the nucleoside base and/or sugar portion of the nucleosides that comprise the polynucleotide. In some embodiments, the modification can be on the internucleoside linkage (e.g., phosphate backbone). In some embodiments, multiple modifications are included in the modified nucleic acid molecule. In some embodiments, a single modification is included in the modified nucleic acid molecule.

[0088] The term “complement”, “complementary”, or “complementarity” as used herein, refers to the ability of two polynucleotide molecules to base pair with each other. Complementary polynucleotides may base pair via hydrogen bonding, which can be Watson Crick, Hoogsteen or reversed Hoogsteen hydrogen bonding. For example, an adenine on one polynucleotide molecule will base pair to a thymine or uracil on a second polynucleotide molecule and a cytosine on one polynucleotide molecule will base pair to a guanine on a second polynucleotide molecule. Two polynucleotide molecules are complementary to each other when a first polynucleotide molecule comprising a first nucleotide sequence can base pair with a second polynucleotide molecule comprising a second nucleotide sequence. For instance, the two DNA molecules 5′-ATGC-3′ and 5′-GCAT-3′ are complementary, and the complement of the DNA molecule 5′-ATGC-3′ is 5′-GCAT-3′. A percentage of complementarity indicates the percentage of nucleotides in a polynucleotide molecule which can base pair with a second polynucleotide molecule (e.g., 5, 6, 7, 8, 9, 10 out of 10 being 50%, 60%, 70%, 80%, 90%, and 100% complementary, respectively). “Perfectly complementary” means that all the contiguous nucleotides of a polynucleotide molecule will base pair with the same number of contiguous nucleotides in a second polynucleotide molecule. “Substantially complementary” as used herein refers to a degree of complementarity that can be at least 70%, 75%, 80%, 85%, 90%, 95%, 97%, 98%, or 99% over all or a portion of two polynucleotide molecules. In some embodiments, the portion of complementarity may be a region of 10, 15, 20, 25, 30, 35, 40, 45, 50, or more nucleotides. “Substantially complementary” can also refer to a 100% complementarity over a portion or region of two polynucleotide molecules. In some embodiments, the portion or region of complementarity between the two polynucleotide molecules is at least 60%, 65%, 70%, 75%, 80%, 85%, 90%, 95%, 97%, 98%, or 99% of the length of at least one of the two polynucleotide molecules or a functional or defined portion thereof.

[0089] As used herein, “expression” refers to the process by which polynucleotides, e.g., DNA, are transcribed into mRNA and/or the process by which polynucleotides, e.g., the transcribed mRNA, translated into peptides, polypeptides, or proteins. If the polynucleotide is derived from genomic DNA, expression can include splicing of the mRNA in a eukaryotic cell. In some embodiments, expression of a polynucleotide, e.g., a gene or a DNA encoding a protein, is determined by the amount of the protein encoded by the gene after transcription and translation of the gene. In some embodiments, expression of a polynucleotide, e.g., a gene or a DNA encoding a protein, is determined by the amount of a functional form of the protein encoded by the gene after transcription and translation of the gene. In some embodiments, expression of a gene is determined by the amount of the mRNA, or transcript, that is encoded by the gene after transcription the gene. In some embodiments, expression of a polynucleotide, e.g., an mRNA, is determined by the amount of the protein encoded by the mRNA after translation of the mRNA. In some embodiments, expression of a polynucleotide, e.g., a mRNA or coding RNA, is determined by the amount of a functional form of the protein encoded by the polypeptide after translation of the polynucleotide.

[0090] The term “sequencing” as used herein, can comprise capillary sequencing, bisulfite-free sequencing, bisulfite sequencing, TET-assisted bisulfite (TAB) sequencing, ACE-sequencing, high-throughput sequencing, Maxam-Gilbert sequencing, massively parallel signature sequencing, Polony sequencing, 454 pyrosequencing, Sanger sequencing, Illumina sequencing, SOLiD sequencing, Ion Torrent semiconductor sequencing, DNA nanoball sequencing, Heliscope single molecule sequencing, single molecule real time (SMRT) sequencing, nanopore sequencing, shot gun sequencing, RNA sequencing, or any combination thereof.

[0091] The terms “equivalent” or “biological equivalent” are used interchangeably when referring to a particular molecule, or biological or cellular material, and means a molecule having minimal homology to another molecule while still maintaining a desired structure or functionality.

[0092] The term “encode” as it is applied to polynucleotides refers to a polynucleotide which is said to “encode” another polynucleotide, a polypeptide, or an amino acid if, in its native state or when manipulated by methods well known to those skilled in the art, it can be used as polynucleotide synthesis template, e.g., transcribed into an RNA, reverse transcribed into a DNA or cDNA, and/or translated to produce an amino acid, or a polypeptide or fragment thereof. In some embodiments, a polynucleotide comprising three contiguous nucleotides form a codon that encodes a specific amino acid. In some embodiments, a polynucleotide comprises one or more codons that encode a polypeptide. In some embodiments, a polynucleotide comprising one or more codons comprises a mutation in a codon compared to a wild-type reference polynucleotide. In some embodiments, the mutation in the codon encodes an amino acid substitution in a polypeptide encoded by the polynucleotide as compared to a wild-type reference polypeptide.

[0093] The term “mutation” as used herein refers to a change and/or alteration in an amino acid sequence of a protein or nucleic acid sequence of a polynucleotide. Such changes and/or alterations can comprise the substitution, insertion, deletion and/or truncation of one or more amino acids, in the case of an amino acid sequence, and/or nucleotides, in the case of nucleic acid sequence, compared to a reference amino acid or a reference nucleic acid sequence. In some embodiments, the reference sequence is a wild-type sequence. In some embodiments, a mutation in a nucleic acid sequence of a polynucleotide encodes a mutation in the amino acid sequence of a polypeptide. In some embodiments, the mutation in the amino acid sequence of the polypeptide or the mutation in the nucleic acid sequence of the polynucleotide is a mutation associated with a disease state. A “reference sequence” is a defined sequence used as a basis for sequence comparison. A reference sequence can be a subset of or the entirety of a specified sequence; for example, a segment of a full-length cDNA sequence, RNA sequence, DNA sequence, gene sequence or polypeptide sequence, or the complete cDNA sequence, RNA sequence, DNA sequence, gene sequence or polypeptide sequence. In some embodiments, a reference sequence is a wild-type sequence of a protein of interest or a variant thereof. In other embodiments, a reference sequence is a polynucleotide sequence encoding a wild-type protein or a variant thereof.

[0094] The term “subject” and its grammatical equivalents as used herein may refer to a human or a non-human. A subject can be a mammal. A human subject can be male or female. A human subject can be of any age. A subject can be a human embryo. A human subject can be a newborn, an infant, a child, an adolescent, or an adult. A human subject can be up to about 100 years of age. A human subject can be in need of treatment for a genetic disease or disorder.

[0095] The terms “treatment” or “treating” and their grammatical equivalents may refer to the medical management of a subject with an intent to cure, ameliorate, or ameliorate a symptom of, a disease, condition, or disorder. Treatment can include active treatment, that is, treatment directed specifically toward the improvement of a disease, condition, or disorder. Treatment can include causal treatment, that is, treatment directed toward removal of the cause of the associated disease, condition, or disorder. In addition, this treatment can include palliative treatment, that is, treatment designed for the relief of symptoms rather than the curing of the disease, condition, or disorder. Treatment can include supportive treatment, that is, treatment employed to supplement another specific therapy directed toward the improvement of the disease, condition, or disorder. In some embodiments, a condition can be pathological. In some embodiments, a treatment can not completely cure or prevent a disease, condition, or disorder. In some embodiments, a treatment ameliorates, but does not completely cure or prevent a disease, condition, or disorder. In some embodiments, a subject can be treated for 12 hours, 24 hours, 2 days, 3 days, 4 days, 5 days, 6 days, 7 days, 2 weeks, 3 weeks, 4 weeks, 2 months, 3 months, 4 months, 5 months, 6 months, 1 year, 2 years, 3 years, 4 years, 5 years, 6 years, indefinitely, or life of the subject.

[0096] The term “ameliorate” and its grammatical equivalents means to decrease, suppress, attenuate, diminish, arrest, reverse, or stabilize the development or progression of a disease.

[0097] The terms “prevent” or “preventing” means delaying, forestalling, or avoiding the onset or development of a disease, condition, or disorder for a period of time. Prevent also means reducing risk of developing a disease, disorder, or condition. Prevention includes minimizing or partially or completely inhibiting the development of a disease, condition, or disorder. In some embodiments, a composition, e.g. a pharmaceutical composition, prevents a disorder by delaying the onset of the disorder for 12 hours, 24 hours, 2 days, 3 days, 4 days, 5 days, 6 days, 7 days, 2 weeks, 3 weeks, 4 weeks, 2 months, 3 months, 4 months, 5 months, 6 months, 1 year, 2 years, 3 years, 4 years, 5 years, 6 years, indefinitely, or life of a subject.

[0098] The term “effective amount” or “therapeutically effective amount” refers to a quantity of a composition, for example, a prime editing composition comprising a construct, that can be sufficient to result in a desired activity upon introduction into a subject as disclosed herein. An effective amount of the prime editing compositions can be provided to a target gene or cell, whether the cell is ex vivo or in vivo. An effective amount can be the amount to induce, for example, at least about a 2-fold change (increase or decrease) or more in the amount of target nucleic acid modulation observed relative to a negative control. An effective amount or dose can induce, for example, about 2-fold increase, about 3-fold increase, about 4-fold increase, about 5-fold increase, about 6-fold increase, about 7-fold increase, about 8-fold increase, about 9-fold increase, about 10-fold increase, about 25-fold increase, about 50-fold increase, about 100-fold increase, about 200-fold increase, about 500-fold increase, about 700-fold increase, about 1000-fold increase, about 5000-fold increase, or about 10,000-fold increase in target gene modulation (e.g., expression of a target gene to produce a functional protein). The amount of target gene modulation can be measured by any suitable method known in the art. In some embodiments, the “effective amount” or “therapeutically effective amount” is the amount of a composition that is required to ameliorate the symptoms of a disease relative to an untreated patient. In some embodiments, an effective amount is the amount of a composition sufficient to introduce an alteration in a gene of interest in a cell (e.g., a cell in vitro or in vivo).

[0099] An effective amount can be the amount to induce, when administered to a population of cells, a certain percentage of the population of cells to have a correction of a mutation. For example, in some embodiments, an effective amount can be the amount to induce, when administered to or introduced to a population of cells, installation of one or more intended nucleotide edits that correct a mutation in the target gene, in at least about 1%, 2%, 5%, about 10%, about 15%, about 20%, about 25%, about 30%, about 35%, about 40%, about 45%, about 50%, about 55%, about 60%, about 65%, about 70%, about 75%, about 80%, about 85%, about 90%, about 95%, or about 99% of the population of cells.

[0100] The term “reverse transcriptase” or “RT” as used herein refers to a class of enzymes that synthesize a DNA molecule from an RNA template. An RT may require the primer molecule with an exposed 3′ hydroxyl group. In some embodiments, the primer molecule of an RT is a DNA molecule. In some embodiments, the primer molecule of an RT is an RNA molecule. In some embodiments, an RT comprises both DNA polymerase activity and RNase H activity. The two activities can reside in two separate domains in an RT.

[0101] The term “linker” as used herein refers to a bond, a chemical group, or a molecule linking two molecules or moieties, e.g., two protein domains to form a fusion protein. In some embodiments, a linker is a peptide linker. In some embodiments, a linker is a polynucleotide or a oligonucleotide linker. For example, a RNA-binding protein recruitment sequence, such as a MS2 polynucleotide sequence, can be used to connect a Cas9 domain and a DNA polymerase domain of a prime editor, wherein one of the Cas9 domain and the DNA polymerase domain is fused to a MS2 coat protein. In some embodiments, a peptide linker can have various lengths, depending on the application of a linker or the sequences or molecules being linked by a linker.

[0102] The term “fusion protein” refers to a protein comprised of domains from more than one naturally occurring or recombinantly produced protein, where generally each domain serves a different function. A domain may comprise a particular makeup of amino acids. A domain may also comprise a structure of proteins as described herein.

[0103] Disclosed herein in some embodiments, are compositions comprising polynucleotides and constructs that comprises a nucleic acid that codes for a PEgRNA as described above, a nick guide sequence as describe above, a primer editor, a prime editing composition or any combination thereof. In certain embodiments, provided herein are prime editors for programmable prime editing of target polynucleotides, e.g., target genes.

### Prime Editing

[0104] The term “prime editing” refers to programmable editing of a target DNA using a prime editor complexed with a PEgRNA to incorporate an intended nucleotide edit (also referred to herein as a nucleotide change) into the target DNA through target-primed DNA synthesis. A target DNA polynucleotide, e.g., a target gene of prime editing can comprise a double stranded DNA molecule having two complementary strands: a first strand that may be referred to as a “target strand” or a “non-edit strand”, and a second strand that may be referred to as a “non-target strand,” or an “edit strand.” In some embodiments, in a prime editing guide RNA (PEgRNA), a spacer sequence is complementary or substantially complementary to a specific sequence on the target strand, which may be referred to as a “search target sequence”. In some embodiments, the spacer sequence anneals with the target strand at the search target sequence. The target strand can also be referred to as the “non-Protospacer Adjacent Motif (non-PAM strand).” In some embodiments, the non-target strand can also be referred to as the “PAM strand”. In some embodiments, the PAM strand comprises a protospacer sequence and optionally a protospacer adjacent motif (PAM) sequence. In prime editing using a Cas-protein-based prime editor, a PAM sequence refers to a short DNA sequence immediately adjacent to the protospacer sequence on the PAM strand of the target gene. A PAM sequence can be specifically recognized by a programmable DNA binding protein, e.g., a Cas nickase or a Cas nuclease. In some embodiments, a specific PAM is characteristic of a specific programmable DNA binding protein, e.g., a Cas nickase or a Cas nuclease, e.g., a Cas9 nickase or a Cas9 nuclease. A protospacer sequence refers to a specific sequence in the PAM strand of the double stranded target DNA (e.g., target gene) that is complementary to the search target sequence. In a PEgRNA, a spacer sequence can have a substantially identical sequence as the protospacer sequence on the edit strand of the double stranded target DNA (e.g., target gene) except that the spacer sequence can comprise Uracil (U) and the protospacer sequence can comprise Thymine (T).

[0105] In some embodiments, the double stranded target DNA comprises a nick site on the PAM strand (or non-target strand). As used herein, a “nick site” refers to a specific position in between two nucleotides or two base pairs of the double stranded target DNA. In some embodiments, the position of a nick site is determined relative to the position of a specific PAM sequence. In some embodiments, the nick site is the particular position where a nick will occur when the double stranded target DNA is contacted with a nickase, for example, a Cas nickase, that recognizes a specific PAM sequence. In some embodiments, the nick site is upstream of a specific PAM sequence on the PAM strand of the double stranded target DNA. In some embodiments, the nick site is downstream of a specific PAM sequence on the PAM strand of the double stranded target DNA. In some embodiments, the nick site is upstream of a PAM sequence recognized by a Cas9 nickase, wherein the Cas9 nickase comprises a nuclease active RuvC domain and a nuclease inactive NHN domain. In some embodiments, the nick site is 3 nucleotides upstream of the PAM sequence, and the PAM sequence is recognized by a Streptococcus pyogenes Cas9 nickase, a P. lavamentivorans Cas9 nickase, a C. diphtheriae Cas9 nickase, a N. cinerea Cas9, a S. aureus Cas9, or a N. lari Cas9 nickase that comprises a nuclease active RuvC domain and a nuclease inactive NHN domain. In some embodiments, the nick site is 2 nucleotides upstream of the PAM sequence, and the PAM sequence is recognized by a S. thermophilus Cas9 nickase that comprises a nuclease active RuvC domain and a nuclease inactive NHN domain.

[0106] A “primer binding site” (also referred to as PBS or primer binding site sequence) is a single-stranded portion of the PEgRNA that comprises a region of complementarity to the PAM strand (i.e., the non-target strand or the edit strand). The PBS is complementary or substantially complementary to a sequence on the PAM strand of the double stranded target DNA that is immediately upstream of the nick site. In some embodiments, in the process of prime editing, the PEgRNA complexes with and directs a prime editor to bind the search target sequence on the target strand of the double stranded target DNA, and generates a nick at the nick site on the non-target strand of the double stranded target DNA. In some embodiments, the PBS is complementary to or substantially complementary to, and can anneal to, a free 3′ end on the non-target strand of the double stranded target DNA at the nick site. In some embodiments, the PBS annealed to the free 3′ end on the non-target strand can initiate target-primed DNA synthesis.

[0107] An “editing template” of a PEgRNA is a single-stranded portion of the PEgRNA that is 5′ of the PBS and comprises a region of complementarity to the PAM strand (i.e. the non-target strand or the edit strand), and comprises one or more intended nucleotide edits compared to the endogenous sequence of the double stranded target DNA. In some embodiments, the editing template and the PBS are immediately adjacent to each other. Accordingly, in some embodiments, a PEgRNA in prime editing comprises a single-stranded portion that comprises the PBS and the editing template immediately adjacent to each other. In some embodiments, the single stranded portion of the PEgRNA comprising both the PBS and the editing template is complementary or substantially complementary to an endogenous sequence on the PAM strand (i.e., the non-target strand or the edit strand) of the double stranded target DNA except for one or more non-complementary nucleotides at the intended nucleotide edit positions. As used herein, regardless of relative 5′-3′ positioning in other context, the relative positions as between the PBS and the editing template, and the relative positions as among elements of a PEgRNA, are determined by the 5′ to 3′ order of the PEgRNA as a single molecule regardless of the position of sequences in the double stranded target DNA that may have complementarity or identity to elements of the PEgRNA. In some embodiments, the editing template is complementary or substantially complementary to a sequence on the PAM strand that is immediately downstream of the nick site, except for one or more non-complementary nucleotides at the intended nucleotide edit positions. The endogenous, e.g., genomic, sequence that is complementary or substantially complementary to the editing template, except for the one or more non-complementary nucleotides at the position corresponding to the intended nucleotide edit, may be referred to as an “editing target sequence”. In some embodiments, the editing template has identity or substantial identity to a sequence on the target strand that is complementary to, or having the same position in the genome as, the editing target sequence, except for one or more insertions, deletions, or substitutions at the intended nucleotide edit positions. In some embodiments, the editing template encodes a single stranded DNA, wherein the single stranded DNA has identity or substantial identity to the editing target sequence except for one or more insertions, deletions, or substitutions at the positions of the one or more intended nucleotide edits.

[0108] In some embodiments, a PEgRNA complexes with and directs a prime editor to bind to the search target sequence of the target gene. In some embodiments, the bound prime editor generates a nick on the edit strand (PAM strand) of the target gene. In some embodiments, a primer binding site (PBS) of the PEgRNA anneals with a free 3′ end formed at the nick site, and the prime editor initiates DNA synthesis from the nick site, using the free 3′ end as a primer. Subsequently, a single-stranded DNA encoded by the editing template of the PEgRNA is synthesized. In some embodiments, the newly synthesized single-stranded DNA comprises one or more intended nucleotide edits compared to an endogenous target gene sequence. Accordingly, in some embodiments, the editing template of a PEgRNA is complementary to a sequence in the edit strand except for one or more mismatches at the intended nucleotide edit positions in the editing template. In some embodiments, the newly synthesized single stranded DNA has identity or substantial identity to a sequence in the editing target sequence, except for one or more insertions, deletions, or substitutions at the intended nucleotide edit positions. The endogenous, e.g., genomic, sequence that is partially complementary to the editing template may be referred to as an “editing target sequence”.

[0109] In some embodiments, the newly synthesized single-stranded DNA equilibrates with the editing target on the edit strand of the double stranded target DNA (e.g., the target gene) for pairing with the target strand of the targe gene. In some embodiments, the editing target sequence of the double stranded target DNA (e.g., target gene) is excised by a flap endonuclease (FEN), for example, FEN1. In some embodiments, the FEN is an endogenous FEN, for example, in a cell comprising the double stranded target DNA, e.g., a target gene. In some embodiments, the FEN is provided as part of the prime editor, either linked to other components of the prime editor or provided in trans. In some embodiments, the newly synthesized single stranded DNA, which comprises the intended nucleotide edit, replaces the endogenous single stranded editing target sequence on the edit strand of the double stranded target DNA (e.g., target gene). In some embodiments, the newly synthesized single stranded DNA and the endogenous DNA on the target strand form a heteroduplex DNA structure at the region corresponding to the editing target sequence of the double stranded target DNA (e.g., target gene). In some embodiments, the newly synthesized single-stranded DNA comprising the nucleotide edit is paired in the heteroduplex with the target strand of the target DNA that does not comprise the nucleotide edit, thereby creating a mismatch between the two otherwise complementary strands. In some embodiments, the mismatch is recognized by DNA repair machinery, e.g., an endogenous DNA repair machinery. In some embodiments, through DNA repair, the intended nucleotide edit is incorporated into the double stranded target DNA (e.g., the target gene).

### Prime Editor

[0110] The term “prime editor (PE)” refers to the polypeptide or polypeptide components involved in prime editing. In various embodiments, a prime editor includes a polypeptide domain having DNA binding activity (e.g., a DNA binding domain) and a polypeptide domain (e.g., a DNA polymerase domain) having DNA polymerase activity. In some embodiments, a prime editor comprises a polypeptide domain (e.g., a DNA binding domain) having DNA binding activity. In some embodiments, a prime editor comprises a polypeptide that comprises a DNA binding domain. In some embodiments, a prime editor comprises a DNA binding domain. In some embodiments, a prime editor comprises a polypeptide domain having DNA polymerase activity (e.g., a DNA polymerase domain). In some embodiments, a prime editor comprises a polypeptide that comprises a DNA polymerase domain. In some embodiments, a prime editor comprises a DNA polymerase domain. In some embodiments, a prime editor comprises a polypeptide that comprises a DNA binding domain and a polypeptide that comprises a DNA polymerase domain. In some embodiments, a prime editor comprises a DNA binding domain and a DNA polymerase domain. In some embodiments, the prime editor comprises a DNA binding domain and DNA polymerase domain that is linked by a linker, e.g., a peptide linker, e.g., a GS rich peptide linker. In some embodiments, the prime editor comprises a fusion polypeptide that comprises a DNA binding domain and a DNA polymerase domain linked by a linker, e.g., a peptide linker, e.g., a GS rich peptide linker.

[0111] In some embodiments, the prime editor comprises a polypeptide domain having a nuclease activity. In some embodiments, the polypeptide domain having DNA binding activity comprises a nuclease domain or nuclease activity. In some embodiments, the DNA binding domain comprises a nuclease domain or nuclease activity. In some embodiments, the polypeptide domain having the nuclease activity comprises a nickase, or a fully active nuclease. In some embodiments, the DNA binding domain comprises a nickase, or a fully active nuclease. As used herein, the term “nickase” refers to a nuclease capable of cleaving only one strand of a double-stranded DNA target. In some embodiments, the prime editor comprises a polypeptide domain that is an inactive nuclease. In some embodiments, the DNA binding domain comprises a nuclease domain that is an inactive nuclease; e.g., dCas9. In some embodiments, the DNA binding domain comprises a comprises a nucleic acid guided DNA binding domain, for example, a CRISPR-Cas protein, for example, a Cas9 nickase, a Cpf1 nickase, or another CRISPR-Cas nuclease. In some embodiments, the DNA binding domain (e.g., a nucleic acid guided DNA binding domain) is a Cas protein domain. In some embodiments, the Cas protein is a Cas9; e.g., Cas9 nuclease; e.g., dCas9, Cas9 nickase. In some embodiments, the Cas protein domain comprises a nickase or a nickase activity. In some embodiments, the DNA binding domain is a Cas9 or a variant thereof (e.g., a nickase variant). In some embodiments, the polypeptide domain having programmable DNA binding activity comprises a nucleic acid guided DNA binding domain, for example, a CRISPR-Cas protein, for example, a Cas9 nickase, a Cpf1 nickase, or another CRISPR-Cas nuclease.

[0112] In some embodiments, the polypeptide domain having DNA polymerase activity comprises a template-dependent DNA polymerase, for example, a DNA-dependent DNA polymerase or an RNA-dependent DNA polymerase. In some embodiments, the DNA binding domain comprises a template-dependent DNA polymerase for example, a DNA-dependent DNA polymerase or an RNA-dependent DNA polymerase. In some embodiments, the DNA polymerase domain comprises a reverse transcriptase domain (RT domain) or a reverse transcriptase (RT). In some embodiments, the DNA polymerase domain is a RT domain or a RT. In some embodiments, a prime editor comprises a reverse transcriptase (RT) activity. For example, the first polypeptide of the prime editor may have activity for target primed reverse transcription. In some embodiments, the polypeptide domain having DNA polymerase activity comprises a reverse transcriptase activity (e.g., activity for target primed reverse transcription).

[0113] In some embodiments, the DNA polymerase is a reverse transcriptase. In some embodiments, the prime editor comprises additional polypeptides involved in prime editing, for example, a polypeptide domain having 5′ endonuclease activity, e.g., a 5′ endogenous DNA flap endonucleases (e.g., FEN1), for helping to drive the prime editing process towards the edited product formation. In some embodiments, the prime editor further comprises an RNA-protein recruitment polypeptide, for example, a MS2 coat protein.

[0114] In some embodiments, a prime editor comprises a Cas polypeptide (i.e., a DNA binding domain) and a reverse transcriptase polypeptide (i.e., a DNA polymerase domain) that are derived from different species. For example, a prime editor may comprise a S. pyogenes Cas9 polypeptide and a Moloney murine leukemia virus (M-MLV) reverse transcriptase polypeptide. In some embodiments, the prime editor comprises a fusion polypeptide that comprises a comprises a Cas polypeptide (i.e., a DNA binding domain) and a reverse transcriptase polypeptide (i.e., a DNA polymerase domain) that are derived from different species. For example, a prime editor may comprise a S. pyogenes Cas9 polypeptide and a Moloney murine leukemia virus (M-MLV) reverse transcriptase (RT) polypeptide.

[0115] In some embodiments, polypeptide domains of a prime editor (e.g., a DNA binding domain and a DNA polymerase domain) are fused or linked by a peptide linker to form a fusion protein. In other embodiments, a prime editor comprises one or more polypeptide domains (e.g., a DNA binding domain and a DNA polymerase domain) provided in trans as separate proteins, which are capable of being associated to each other through non-peptide linkages or through aptamers or recruitment sequences. In some embodiments, a prime editor comprises a DNA binding domain and a DNA polymerase domain (e.g., a reverse transcriptase domain or RT) fused or linked with each other by a peptide linker (e.g., linkers disclosed set forth in SEQ ID NOs: 286-411).

[0116] In some embodiments, the prime editor comprises a DNA binding domain and a DNA polymerase domain (e.g., a reverse transcriptase domain or RT) fused or linked with each other by an RNA-protein recruitment aptamer, e.g., a MS2 aptamer, which can, in some embodiments, be linked to a PEgRNA.

[0117] In some embodiments, a prime editor further comprises one or more nuclear localization sequence (NLS). In some embodiments, one or more polypeptides of the prime editor are fused to or linked to (e.g., via a peptide linker) one or more NLSs. In some embodiments, the prime editor comprises a DNA binding domain and a DNA polymerase domain that are provided in trans, wherein the DNA binding domain and/or the DNA polymerase domain is fused or linked to one or more NLSs.

[0118] Prime editor polypeptide components can be encoded by one or more polynucleotides in whole or in part. The present disclosure contemplates polynucleotides encoding the prime editor components, for example, a polynucleotide encoding a DNA binding domain, and a polynucleotide encoding a DNA polymerase domain. The present disclosure also contemplates a single polynucleotide comprising a polynucleotide encoding a DNA binding domain, and a polynucleotide encoding a DNA polymerase domain. In some embodiments, a prime editing composition comprises a polynucleotide encoding a DNA polymerase domain. In some embodiments, the polynucleotide encoding a DNA polymerase domain is a DNA. In some embodiments, the polynucleotide encoding a DNA polymerase domain is an RNA (e.g., a mRNA). In some embodiments, a prime editing composition comprises a polynucleotide encoding a DNA binding domain. In some embodiments, the polynucleotide encoding the DNA binding domain is a DNA. In some embodiments, the polynucleotide encoding the DNA binding domain is an RNA (e.g., a mRNA). In some embodiments, the polynucleotide encoding a DNA binding domain, and the polynucleotide encoding a DNA polymerase domain are linked by a linker polynucleotide (e.g., that encodes a peptide linker) to result in a fusion protein (e.g., a prime editor) that comprises the DNA polymerase domain and DNA binding domain linked by a peptide linker. In some embodiments, the linker polynucleotide is a DNA. In some embodiments, the linker polynucleotide is an RNA (e.g., mRNA). In some embodiments, the polynucleotide sequence encoding a DNA binding domain, and the polynucleotide encoding a DNA polymerase domain are linked by a linker polynucleotide (e.g., that encodes a peptide linker) further comprises one or more polynucleotide sequences encoding one or more NLS to result in a fusion protein (e.g., a prime editor) that comprises the DNA polymerase domain and DNA binding domain linked by a peptide linker and further fused to or linked to one or more NLS.

[0119] In some embodiments, a single polynucleotide (e.g., a single mRNA) construct, or vector encodes the prime editor fusion protein. In some embodiments, multiple polynucleotides, constructs, or vectors each encode a polypeptide domain or portion of a domain of a prime editor, or a portion of a prime editor fusion protein. For example, a prime editor fusion protein can comprise an N-terminal portion fused to an intein-N and a C-terminal portion fused to an intein-C, each of which is individually encoded by an AAV vector. In some embodiments, components of a prime editor disclosed herein (e.g., a polypeptide comprising a DNA binding domain and/or a polypeptide comprising a DNA polymerase domain) can be brought together post-translationally via a split-intein.

[0120] In some embodiments, a prime editor polypeptide may comprise an amino acid sequence, wherein the initial methionine (at position 1) is optionally not present. In some embodiments, a prime editor polypeptide sequence may comprise a N-terminal methionine residue. In some embodiments, a prime editor polypeptide sequence may lack a N-terminus methionine. In some embodiments, the N-terminal methionine encoded by the translation initiation codon, e.g., ATG, may be removed from the prime editor polypeptide after translation. In some embodiments, the N-terminal methionine encoded by the translation initiation codon, e.g., ATG, may remain present in the prime editor polypeptide sequence. In some embodiments, the amino acid sequence of a prime editor polypeptide can be N-terminally modified by one or more processing enzymes, e.g., by Methionine aminopeptidases (MAP).

[0121] In some embodiments, a prime editor comprises a DNA polymerase domain and a DNA binding domain, wherein the amino acid sequences of the DNA polymerase domain and/or the DNA binding domain comprise a N terminus methionine. In some embodiments, a prime editor comprises a DNA polymerase domain that comprises an amino acid sequence that lacks a N-terminus methionine relative to a reference DNA polymerase amino acid sequence. In some embodiments, a prime editor comprises a DNA binding domain that comprises an amino acid sequence that lacks a N-terminus methionine relative to a reference DNA binding domain amino acid sequence.

[0122] In some embodiments, a prime editor and/or a component thereof (e.g., a DNA binding domain or a polypeptide comprising a DNA binding domain and/or a DNA polymerase domain or a polypeptide comprising a DNA polymerase domain) can be engineered. In some embodiments, the polypeptide components of a prime editor do not naturally occur in the same organism or cellular environment. In some embodiments, the polypeptide components of a prime editor can be of different origins or from different organisms. In some embodiments, a prime editor comprises a DNA binding domain and a DNA polymerase domain that are derived from different species.

[0123] In some embodiments, a prime editor comprises a RT or an RT domain (e.g., a M-MLV RT) that is rationally engineered. Such an engineered RT or RT domain can comprise, for example, sequences or amino acid changes different from a naturally occurring RT or RT domain. In some embodiments, the engineered RT or RT domain comprises improved RT activity relative to a corresponding naturally occurring RT or RT domain. In some embodiments, the engineered RT or RT domain comprises improved prime editing efficiency relative to a corresponding naturally occurring RT or RT domain, when used in a prime editor.

[0124] In some embodiments, a prime editor polypeptide comprises a DNA binding domain (e.g., a Cas9) comprising an amino acid sequence that is at least 80%, at least 81%, at least 82%, at least 83%, at least 84%, at least 85%, at least 86%, at least 87%, at least 88%, at least 89%, at least 90%, at least 91%, at least 92%, at least 93%, at least 94%, at least 95%, at least 96%, at least 97%, at least 98%, at least 99% identical, or 100% identical to any one of the amino acid sequences recited in Table 14 or to any one of amino acid sequences set forth in SEQ ID NOs: 2, 6, 7, or 596-613.

[0125] In some embodiments, a prime editing composition comprises a) a DNA binding domain or a polynucleotide encoding the DNA binding domain, and b) a Moloney Murine Leukemia reverse transcriptase (M-MLV RT) domain or a polynucleotide encoding the M-MLV RT domain, wherein the M-MLV RT domain is truncated at C-Terminus at a position after amino acid L478 as set forth in SEQ ID NO:1, 5, or 623. In some embodiments, a prime editing composition comprises a) a DNA binding domain or a polynucleotide encoding the DNA binding domain, and b) a Moloney Murine Leukemia reverse transcriptase (M-MLV RT) domain or a polynucleotide encoding the M-MLV RT domain, wherein the M-MLV RT domain is truncated at C-Terminus at a position truncated at a position between L478 and G504 as set forth in SEQ ID NO:1, 5, or 623.

[0126] In some embodiments, a prime editor polypeptide comprises a DNA polymerase domain comprising a MMLV-RT or a mutant, fragment or variant thereof. In some embodiments, a prime editor comprises a wild type MMLV-RT. In some embodiments, a prime editor comprises a MMLV-RT variant comprising one or more amino acid substitutions, insertions, and/or deletions, e.g., a MMLV-RT variant comprising one or more amino acid substitutions, insertions, and/or deletions compared to the reference MMLV-RT sequence set forth in SEQ ID NO: 1. In some embodiments, the MMLVRT variant comprises one or more D200N, T306K, W313F, T330P, L603W amino acid substitutions as compared to reference MMLVRT sequence SEQ ID No 1. In some embodiments, the MMLVRT variant comprises D200N, T306K, W313F, T330P, and L603W amino acid substitutions as compared to reference MMLVRT sequence SEQ ID No 1 (the variant also referred to as a MMLVRT_{5M} variant). In some embodiments, the MMLV RT variant comprises one or more of D524N, L435K, Y133R, Y271R amino acid substitution as compared to reference MMLVRT sequence SEQ ID No 1. In some embodiments, the MMLV RT variant has one or more amino acid deletion compared to the reference MMLVRT sequence SEQ ID No 1. For example, in some embodiments, the MMLV RT variant is truncated at the C terminus between positions corresponding to amino acids 504 and 505 as set forth in SEQ ID NO: 1. By truncated at the C terminus, it is meant that amino acids C terminal to the truncation position are deleted from the MMLV RT sequence as compared to reference sequence, i.e. the MMLV RT variant that is truncated at the C terminus between positions corresponding to amino acids 504 and 505 as set forth in SEQ ID NO: 1 contains only amino acids at positions 1-504 as set forth in SEQ ID No: 1 (such truncation may be referred to herein as a 504X, or G504X truncation). In some embodiments, the MMLV RT variant is truncated at the C terminus between positions corresponding to amino acids 478 and 479 as set forth in SEQ ID NO: 1 (a L478X truncation). In some embodiments, the MMLV RT variant is truncated at the C terminus at any amino acid position between positions 478 and 505 as set forth in SEQ ID NO:1. In some embodiments, the MMLV RT variant is truncated at the C terminus between positions corresponding to amino acids 365 and 366 as set forth in SEQ ID NO: 1 (a P365X truncation). In some embodiments, the MMLV RT variant is truncated at the C terminus between positions corresponding to amino acids 278 and 279 as set forth in SEQ ID NO: 1 (a R278X truncation). In some embodiments, the MMLV RT variant is truncated at the C terminus between positions corresponding to amino acids 328 and 329 as set forth in SEQ ID NO: 1 (a T328X truncation). In some embodiments, the MMLV RT variant is truncated at the C terminus between positions corresponding to amino acids 378 and 379 as set forth in SEQ ID NO: 1 (a K478X truncation). In some embodiments, the MMLV RT variant is truncated at the C terminus between positions corresponding to amino acids 428 and 429 as set forth in SEQ ID NO: 1 (a M428X truncation). In some embodiments, a prime editor polypeptide comprises a DNA polymerase domain (e.g., a MMLV-RT) comprising an amino acid sequence that is at least 80%, at least 81%, at least 82%, at least 83%, at least 84%, at least 85%, at least 86%, at least 87%, at least 88%, at least 89%, at least 90%, at least 91%, at least 92%, at least 93%, at least 94%, at least 95%, at least 96%, at least 97%, at least 98%, at least 99% identical, or 100% identical to any one of the amino acid sequences recited in Table 67 or to any one of amino acid sequences set forth in SEQ ID NOs: 1, 4, 5, 36, 45, 54, 63, or 623. In some embodiments, a prime editor polypeptide comprises a MMLV-RT domain comprising an amino acid sequence SEQ ID NOs: 5. In some embodiments, a prime editor polypeptide comprises a C-terminal truncated MMLV-RT domain having the amino acid sequence of SEQ ID NO: 36.

[0127] In some embodiments, a prime editor polypeptide comprises one or more peptide linkers that connect a DNA binding domain and a DNA polymerase domain. In some embodiments, the prime editor comprises, from N terminus to C terminus, a DNA binding domain, a peptide linker, and a DNA polymerase domain. In some embodiments, the prime editor comprises, from C terminus to N terminus, a DNA binding domain, a peptide linker, and a DNA polymerase domain. In some embodiments, a prime editor comprises a peptide linker comprising an amino acid sequence that is at least 80%, at least 81%, at least 82%, at least 83%, at least 84%, at least 85%, at least 86%, at least 87%, at least 88%, at least 89%, at least 90%, at least 91%, at least 92%, at least 93%, at least 94%, at least 95%, at least 96%, at least 97%, at least 98%, at least 99% identical, or 100% identical to any one of the amino acid sequences recited in Table 3 or to any one of amino acid sequences set forth in SEQ ID NOs: 286-411. In some embodiments, a prime editor comprises a peptide linker comprising an amino acid sequence that is at least 90%, at least 91%, at least 92%, at least 93%, at least 94%, at least 95%, at least 96%, at least 97%, at least 98%, at least 99% identical, or 100% identical to any one of the amino acid sequences recited in Table 3 or to any one of amino acid sequences set forth in SEQ ID NOs: 286-411. In some embodiments, a prime editor comprises a peptide linker comprising an amino acid sequence that comprises an amino acid sequence selected from the group consisting of SEQ ID NOs: 286-411. In some embodiments, a prime editor comprises a peptide linker comprising an amino acid sequence that is at least 80%, at least 81%, at least 82%, at least 83%, at least 84%, at least 85%, at least 86%, at least 87%, at least 88%, at least 89%, at least 90%, at least 91%, at least 92%, at least 93%, at least 94%, at least 95%, at least 96%, at least 97%, at least 98%, at least 99% identical, or 100% identical to any one of the amino acid sequences recited in Table 3 or to any one of amino acid sequences set forth in SEQ ID NOs: 289-311. In some embodiments, a prime editor comprises a peptide linker comprising an amino acid sequence that is at least 90%, at least 91%, at least 92%, at least 93%, at least 94%, at least 95%, at least 96%, at least 97%, at least 98%, at least 99% identical, or 100% identical to any one of the amino acid sequences recited in Table 3 or to any one of amino acid sequences set forth in SEQ ID NOs: 289-311. In some embodiments, a prime editor comprises a peptide linker comprising an amino acid sequence that comprises an amino acid sequence selected from the group consisting of SEQ ID NOs: 289-311. In some embodiments, a prime editor comprises a peptide linker comprising an amino acid sequence that is at least 80%, at least 81%, at least 82%, at least 83%, at least 84%, at least 85%, at least 86%, at least 87%, at least 88%, at least 89%, at least 90%, at least 91%, at least 92%, at least 93%, at least 94%, at least 95%, at least 96%, at least 97%, at least 98%, at least 99% identical, or 100% identical to SEQ ID NO: 302. In some embodiments, a prime editor comprises a peptide linker comprising an amino acid sequence that is at least 90%, at least 91%, at least 92%, at least 93%, at least 94%, at least 95%, at least 96%, at least 97%, at least 98%, at least 99% identical, or 100% identical to SEQ ID NO: 302. In some embodiments, a prime editor comprises a peptide linker comprising an amino acid sequence that comprises an amino acid sequence of SEQ ID NO: 302.

[0128] In some embodiments, a prime editor polypeptide comprises one or more NLSs. In some embodiments, a DNA binding domain of a prime editor comprises one or more NLSs. In some embodiments, a DNA polymerase domain of a prime editor comprises one or more NLSs. In some embodiments, a DNA binding domain of a prime editor comprises two or more NLSs. In some embodiments, a DNA polymerase domain of a prime editor comprises two or more NLSs. In some embodiments, a prime editor comprises a fusion protein comprising one or more or two or more NLSs in between a DNA binding domain and a DNA polymerase domain. The NLS sequence can be any NLS known in the art. In some embodiments, a prime editor comprises a NLS comprising an amino acid sequence that is at least at least 80%, at least 81%, at least 82%, at least 83%, at least 84%, 85%, at least 86%, at least 87%, at least 88%, at least 89%, at least 90%, at least 91%, at least 92%, at least 93%, at least 94%, at least 95%, at least 96%, at least 97%, at least 98%, at least 99% identical, or 100% identical to any one of the amino acid sequences recited in Table 2 or to any one of amino acid sequences set forth in SEQ ID NOs: 8-24, or 621. In some embodiments, a prime editor comprises a fusion protein comprising a DNA binding domain and a DNA polymerase domain. In some embodiments, the prime editor comprises a fusion protein comprising from N terminus to C terminus a DNA binding domain and a DNA polymerase domain. In some embodiments, the fusion protein comprises a NLS at the N terminus, wherein the NLS comprises the sequence of SEQ ID NO 8, 9, or 10. In some embodiments, the fusion protein comprises a NLS at the N terminus, wherein the NLS comprises a sequence selected from the group consisting of SEQ ID NOs 11-24. In some embodiments, the fusion protein comprises a NLS at the N terminus, wherein the NLS comprises the sequence of SEQ ID NO 11, 12, 13, or 14. In some embodiments, a prime editor comprises (a) a DNA binding domain and (b) a DNA polymerase domain comprising a MMLV-RT or a mutant, fragment or variant thereof, wherein the DNA binding domain and the DNA polymerase domain are connect by a peptide linker to form a fusion protein. In some embodiments, the prime editor fusion protein comprises the DNA binding domain and the DNA polymerase domain from N terminus to C terminus. In some embodiments, the prime editor fusion protein comprises the DNA binding domain and the DNA polymerase domain from C terminus to N terminus. In some embodiments, the DNA binding domain comprises an amino acid sequence that is at least at least 80%, at least 81%, at least 82%, at least 83%, at least 84%, 85%, at least 86%, at least 87%, at least 88%, at least 89%, at least 90%, at least 91%, at least 92%, at least 93%, at least 94%, at least 95%, at least 96%, at least 97%, at least 98%, at least 99% identical, or 100% identical to any one of the amino acid sequences recited in Table 14 or to any one of amino acid sequences set forth in SEQ ID NOs: 2, 6, 7, or 596-613. In some embodiments, the DNA polymerase domain comprises a MMLVRT5M variant. In some embodiments, the DNA polymerase comprises a MMLV RT variant having one or more of D524N, L435K, Y133R, Y271R amino acid substitution as compared to reference MMLVRT sequence SEQ ID No 1. In some embodiments, the DNA polymerase comprises a MMLV RT variant having one or more of D200N, T306K, W313F, T330P, and L603W amino acid substitution as compared to reference MMLVRT sequence SEQ ID No 1. In some embodiments, the DNA polymerase comprises a MMLV RT G504X truncation variant, a MMLV RT L478 truncation variant, a MMLV RT K478X truncation variant, a MMLV RT M428X truncation variant, a MMLV RT T328X truncation variant, a MMLV RT R278X truncation variant, In some embodiments, the DNA polymerase domain comprises an amino acid sequence that is at least 80%, at least 81%, at least 82%, at least 83%, at least 84%, at least 85%, at least 86%, at least 87%, at least 88%, at least 89%, at least 90%, at least 91%, at least 92%, at least 93%, at least 94%, at least 95%, at least 96%, at least 97%, at least 98%, at least 99% identical, or 100% identical to any one of the amino acid sequences recited in Table 67 or to any one of amino acid sequences set forth in SEQ ID NOs: 1, 4, 5, 36, 45, 54, 63, or 623. In some embodiments, the peptide linker connecting the DNA binding domain and the DNA polymerase domain comprises an amino acid sequence that is at least 80%, at least 81%, at least 82%, at least 83%, at least 84%, at least 85%, at least 86%, at least 87%, at least 88%, at least 89%, at least 90%, at least 91%, at least 92%, at least 93%, at least 94%, at least 95%, at least 96%, at least 97%, at least 98%, at least 99% identical, or 100% identical to any one of the amino acid sequences recited in Table 3 or to any one of amino acid sequences set forth in SEQ ID NOs: 286-411. In some embodiments, the peptide linker comprises a sequence having at least 90%, at least 91%, at least 92%, at least 93%, at least 94%, at least 95%, at least 96%, at least 97%, at least 98%, at least 99% identical, or 100% identical to any one of the amino acid sequences recited in Table 3 or to any one of amino acid sequences set forth in SEQ ID NOs: 286-411. In some embodiments, a prime editor comprises a peptide linker comprising an amino acid sequence that is at least 80%, at least 81%, at least 82%, at least 83%, at least 84%, at least 85%, at least 86%, at least 87%, at least 88%, at least 89%, at least 90%, at least 91%, at least 92%, at least 93%, at least 94%, at least 95%, at least 96%, at least 97%, at least 98%, at least 99% identical, or 100% identical to any one of the amino acid sequences recited in Table 3 or to any one of amino acid sequences set forth in SEQ ID NOs: 289-311. In some embodiments, a prime editor comprises a peptide linker comprising an amino acid sequence that is at least 90%, at least 91%, at least 92%, at least 93%, at least 94%, at least 95%, at least 96%, at least 97%, at least 98%, at least 99% identical, or 100% identical to any one of the amino acid sequences recited in Table 3 or to any one of amino acid sequences set forth in SEQ ID NOs: 289-311. In some embodiments, a prime editor comprises a peptide linker comprising an amino acid sequence that comprises an amino acid sequence selected from the group consisting of SEQ ID NOs: 289-311. In some embodiments, a prime editor comprises a peptide linker comprising an amino acid sequence that is at least 80%, at least 81%, at least 82%, at least 83%, at least 84%, at least 85%, at least 86%, at least 87%, at least 88%, at least 89%, at least 90%, at least 91%, at least 92%, at least 93%, at least 94%, at least 95%, at least 96%, at least 97%, at least 98%, at least 99% identical, or 100% identical to SEQ ID NO: 302. In some embodiments, a prime editor comprises a peptide linker comprising an amino acid sequence that is at least 90%, at least 91%, at least 92%, at least 93%, at least 94%, at least 95%, at least 96%, at least 97%, at least 98%, at least 99% identical, or 100% identical to SEQ ID NO: 302. In some embodiments, a prime editor comprises a peptide linker comprising an amino acid sequence that comprises an amino acid sequence of SEQ ID NO: 302. In some embodiments, the prime editor further comprises one or more NLS comprising an amino acid sequence that is at least 85%, at least 86%, at least 87%, at least 88%, at least 89%, at least 90%, at least 91%, at least 92%, at least 93%, at least 94%, at least 95%, at least 96%, at least 97%, at least 98%, at least 99% identical, or 100% identical to any one of the amino acid sequences recited in Table 2 or to any one of amino acid sequences set forth in SEQ ID NOs: 8-24, or 621 wherein the NLS is fused or linked (e.g., via a linker comprising an amino acid sequence at least 85%, at least 86%, at least 87%, at least 88%, at least 89%, at least 90%, at least 91%, at least 92%, at least 93%, at least 94%, at least 95%, at least 96%, at least 97%, at least 98%, at least 99% identical, or 100% identical to any one of the amino acid sequences recited in Table 3 or to any one of amino acid sequences set forth in SEQ ID NOs: 286-411) to the C-terminus or N terminus of the DNA binding domain or the DNA polymerase domain.

[0129] In some embodiments, a prime editor polypeptide comprises a DNA binding domain comprising an amino acid sequence that is at least 85%, at least 86%, at least 87%, at least 88%, at least 89%, at least 90%, at least 91%, at least 92%, at least 93%, at least 94%, at least 95%, at least 96%, at least 97%, at least 98%, at least 99% identical, or 100% identical to any one of the amino acid sequences recited in Table 14 or to any one of amino acid sequences set forth in SEQ ID NOs: 2, 6, 7, or 596-613, further comprising a DNA polymerase domain comprising an amino acid sequence that is at least 85%, at least 86%, at least 87%, at least 88%, at least 89%, at least 90%, at least 91%, at least 92%, at least 93%, at least 94%, at least 95%, at least 96%, at least 97%, at least 98%, at least 99% identical, or 100% identical to any one of the amino acid sequences recited in Table 67 or to any one of amino acid sequences set forth in SEQ ID NOs: 1, 4, 5, 36, 45, 54, 63, or 623 and optionally wherein the DNA binding domain and the DNA polymerase domain are fused or linked by a peptide linker having an amino acid sequence that is at least 85%, at least 86%, at least 87%, at least 88%, at least 89%, at least 90%, at least 91%, at least 92%, at least 93%, at least 94%, at least 95%, at least 96%, at least 97%, at least 98%, at least 99% identical, or 100% identical to any one of the amino acid sequences recited in Table 3 or to any one of amino acid sequences set forth in SEQ ID NOs: 286-411 and optionally further comprises one or more NLS comprising an amino acid sequence that is at least 85%, at least 86%, at least 87%, at least 88%, at least 89%, at least 90%, at least 91%, at least 92%, at least 93%, at least 94%, at least 95%, at least 96%, at least 97%, at least 98%, at least 99% identical, or 100% identical to any one of the amino acid sequences recited in Table 2 or to any one of amino acid sequences set forth in SEQ ID NOs: 8-23, or 621 wherein the NLS is fused or linked (e.g., via a linker comprising an amino acid sequence at least 85%, at least 86%, at least 87%, at least 88%, at least 89%, at least 90%, at least 91%, at least 92%, at least 93%, at least 94%, at least 95%, at least 96%, at least 97%, at least 98%, at least 99% identical, or 100% identical to any one of the amino acid sequences recited in Table 3 or to any one of amino acid sequences set forth in SEQ ID NOs: 286-411) to the C-terminal or N terminal of the DNA binding domain or the DNA polymerase domain.

[0130] In some embodiments, a prime editor may comprise a DNA binding domain having an amino acid sequence that is selected from any of the amino acid sequence selected from 2, 6, 7, or 596-613, a DNA polymerase domain having an amino acid sequence that is selected from any of the amino acid sequence selected from SEQ ID NOs: 1, 4, 5, 36, 45, 54, 63, or 623, and optionally a linker having an amino acid sequence that is selected from any of the amino acid sequence selected from SEQ ID NOs: 286-411. In some embodiments, a prime editor further comprises one or more nuclear localization sequence (NLS) having an amino acid sequence that is selected from any of the amino acid sequence selected from SEQ ID NOs: 8-23, or 621 or described herein. In some embodiments, the NLS is fused to the N-terminus of a DNA polymerase domain described herein. In some embodiments, the NLS is fused to the C-terminus of the DNA polymerase domain. In some embodiments, the NLS is fused to the N-terminus or the C-terminus of a DNA binding domain. In some embodiments, a linker sequence is disposed between the NLS and a domain of the prime editor, e.g., a linker comprising an amino acid sequence that is selected from any of the amino acid sequence selected from SEQ ID NOs: 286-411.

[0131] In some embodiments, a prime editor polypeptide comprises a DNA binding domain comprising an amino acid sequence that is at least 85%, at least 86%, at least 87%, at least 88%, at least 89%, at least 90%, at least 91%, at least 92%, at least 93%, at least 94%, at least 95%, at least 96%, at least 97%, at least 98%, at least 99% identical, or 100% identical to an amino acid sequences as set forth in SEQ ID NOs: 7, further comprising a DNA polymerase domain comprising an amino acid sequence that is at least 85%, at least 86%, at least 87%, at least 88%, at least 89%, at least 90%, at least 91%, at least 92%, at least 93%, at least 94%, at least 95%, at least 96%, at least 97%, at least 98%, at least 99% identical, or 100% identical an amino acid sequence as set forth in SEQ ID NO: 5, optionally wherein the DNA binding domain and the DNA polymerase domain are fused or linked by a peptide linker having an amino acid sequence that is at least 85%, at least 86%, at least 87%, at least 88%, at least 89%, at least 90%, at least 91%, at least 92%, at least 93%, at least 94%, at least 95%, at least 96%, at least 97%, at least 98%, at least 99% identical, or 100% identical to an amino acid sequence as set forth in SEQ ID NOs: 289 and optionally further comprises one or more NLS comprising an amino acid sequence that is at least 85%, at least 86%, at least 87%, at least 88%, at least 89%, at least 90%, at least 91%, at least 92%, at least 93%, at least 94%, at least 95%, at least 96%, at least 97%, at least 98%, at least 99% identical, or 100% identical to any one of the amino acid sequences recited in Table 2 or to any one of amino acid sequences set forth in SEQ ID NOs: 9, 10, or 11 wherein the NLS is fused or linked (e.g., via a linker comprising an amino acid sequence at least 85%, at least 86%, at least 87%, at least 88%, at least 89%, at least 90%, at least 91%, at least 92%, at least 93%, at least 94%, at least 95%, at least 96%, at least 97%, at least 98%, at least 99% identical, or 100% identical to an amino acid sequences recited as set forth in SEQ ID NO: 288) to the C-terminal or N terminal of the DNA binding domain or the DNA polymerase domain.

[0132] In some embodiments, a prime editor polypeptide comprises a DNA binding domain comprising an amino acid sequence that is at least 85%, at least 86%, at least 87%, at least 88%, at least 89%, at least 90%, at least 91%, at least 92%, at least 93%, at least 94%, at least 95%, at least 96%, at least 97%, at least 98%, at least 99% identical, or 100% identical to an amino acid sequences as set forth in SEQ ID NOs: 7, further comprising a DNA polymerase domain comprising an amino acid sequence that is at least 85%, at least 86%, at least 87%, at least 88%, at least 89%, at least 90%, at least 91%, at least 92%, at least 93%, at least 94%, at least 95%, at least 96%, at least 97%, at least 98%, at least 99% identical, or 100% identical an amino acid sequence as set forth in SEQ ID NO: 36, optionally wherein the DNA binding domain and the DNA polymerase domain are fused or linked by a peptide linker having an amino acid sequence that is at least 85%, at least 86%, at least 87%, at least 88%, at least 89%, at least 90%, at least 91%, at least 92%, at least 93%, at least 94%, at least 95%, at least 96%, at least 97%, at least 98%, at least 99% identical, or 100% identical to an amino acid sequence as set forth in SEQ ID NOs: 289 and optionally further comprises one or more NLS comprising an amino acid sequence that is at least 85%, at least 86%, at least 87%, at least 88%, at least 89%, at least 90%, at least 91%, at least 92%, at least 93%, at least 94%, at least 95%, at least 96%, at least 97%, at least 98%, at least 99% identical, or 100% identical to any one of the amino acid sequences recited in Table 2 or to any one of amino acid sequences set forth in SEQ ID NOs: 9, 10, or 11 wherein the NLS is fused or linked (e.g., via a linker comprising an amino acid sequence at least 85%, at least 86%, at least 87%, at least 88%, at least 89%, at least 90%, at least 91%, at least 92%, at least 93%, at least 94%, at least 95%, at least 96%, at least 97%, at least 98%, at least 99% identical, or 100% identical to an amino acid sequences recited as set forth in SEQ ID NO: 288) to the C-terminal or N terminal of the DNA binding domain or the DNA polymerase domain.

[0133] In some embodiments, a prime editor may comprise a DNA binding domain having an amino acid sequence as set forth in SEQ ID NO: 7, a DNA polymerase domain having an amino acid sequence that is selected from any of the amino acid sequence selected from SEQ ID NOs: 5 or 36 and optionally a linker having an amino acid sequence that is selected from any of the amino acid sequence selected from SEQ ID NOs:302 or 309. In some embodiments, a prime editor further comprises one or more nuclear localization sequence (NLS) having an amino acid sequence that is selected from any of the amino acid sequence selected from SEQ ID NOs: 9, 10 or 11 as described herein. In some embodiments, a prime editor may comprise a DNA binding domain having an amino acid sequence as set forth in SEQ ID NO: 7, a DNA polymerase domain having an amino acid sequence as set forth in SEQ ID NOs: 5, optionally a linker having an amino acid sequence that is selected from any of the amino acid sequence selected from SEQ ID NOs:288, 289, or 302 and optionally further comprises one or more nuclear localization sequence (NLS) having an amino acid sequence that is selected from any of the amino acid sequence selected from SEQ ID NOs: 9, 10 or 11 as described herein. In some embodiments, a prime editor may comprise a DNA binding domain having an amino acid sequence as set forth in SEQ ID NO: 7, a DNA polymerase domain having an amino acid sequence as set forth in SEQ ID NOs: 36, optionally a linker having an amino acid sequence that is selected from any of the amino acid sequence selected from SEQ ID NOs:288, 289, or 302 and optionally further comprises one or more nuclear localization sequence (NLS) having an amino acid sequence that is selected from any of the amino acid sequence selected from SEQ ID NOs: 9, 10 or 11 as described herein.

[0134] In some embodiments, a prime editor may comprise an amino acid sequence that is at least 85%, at least 86%, at least 87%, at least 88%, at least 89%, at least 90%, at least 91%, at least 92%, at least 93%, at least 94%, at least 95%, at least 96%, at least 97%, at least 98%, at least 99% identical, or 100% identical to any one of the amino acid sequences recited in any of the Tables 14-65 or to any one of amino acid sequences set forth in SEQ ID NOs: 25, 34, 35, 43, 44, 52, 53, 61, 62, 63, 70-78, 85, 86, 93, 96, 99, 104, 105, 110, 111, 116, 117, 122, 125, 128, 131, 134, 137, 140, 143, 146, 149, 152, 155, 158, 161, 164, 170, 176, 179, 182, 185, 188, 191, 194, 197, 200, 203, 206, 209, 212, 215, 218, 221, 224, 227, 230, 620, 622, 624, 625, 647. In some embodiments, a prime editor may comprise an amino acid sequence that is selected from any of the amino acid sequence selected from any one of the amino acid sequences recited in any of the Tables 15-65 or to any one of amino acid sequences set forth in SEQ ID NOs: 25, 34, 35, 43, 44, 52, 53, 61, 62, 63, 70-78, 85, 86, 93, 96, 99, 104, 105, 110, 111, 116, 117, 122, 125, 128, 131, 134, 137, 140, 143, 146, 149, 152, 155, 158, 161, 164, 170, 176, 179, 182, 185, 188, 191, 194, 197, 200, 203, 206, 209, 212, 215, 218, 221, 224, 227, 230, 620, 622, 624, 625, 647.

[0135] In some embodiments, the prime editor comprises an amino acid sequence that has no more than 1, 2, 3, 4, 5, 6, 7, 8, 9, 10, 11, 12, 13, 14, 15, 16, 17, 18, 19, 20, 21, 22, 23, 24, 25, 26, 27, 28, 29, 30, 31, 32, 33, 34, 35, 36, 37, 38, 39, or 40 differences e.g., mutations e.g., amino acid deletions, amino acid insertions, and/or amino acid substitutions compared to any of the amino acid sequences set forth in SEQ ID NOs: 25, 34, 35, 43, 44, 52, 53, 61, 62, 63, 70-78, 85, 86, 93, 96, 99, 104, 105, 110, 111, 116, 117, 122, 125, 128, 131, 134, 137, 140, 143, 146, 149, 152, 155, 158, 161, 164, 170, 176, 179, 182, 185, 188, 191, 194, 197, 200, 203, 206, 209, 212, 215, 218, 221, 224, 227, 230, 620, 622, 624, 625, or 647. In some embodiments, the prime editor comprises an amino acid sequence that has no more than 1, 2, 3, 4, 5, 6, 7, 8, 9, 10, 11, 12, 13, 14, 15, 16, 17, 18, 19, 20, 21, 22, 23, 24, 25, 26, 27, 28, 29, 30, 31, 32, 33, 34, 35, 36, 37, 38, 39, or 40 differences e.g., mutations e.g., amino acid deletions, amino acid insertions, and/or amino acid substitutions compared to any of the amino acid sequences listed in any one of the Tables 15-65. In some embodiments, the prime editor comprises an amino acid sequence identical to any one of the sequences set forth in SEQ ID NOs: 25, 34, 35, 43, 44, 52, 53, 61, 62, 63, 70-78, 85, 86, 93, 96, 99, 104, 105, 110, 111, 116, 117, 122, 125, 128, 131, 134, 137, 140, 143, 146, 149, 152, 155, 158, 161, 164, 170, 176, 179, 182, 185, 188, 191, 194, 197, 200, 203, 206, 209, 212, 215, 218, 221, 224, 227, 230, 620, 622, 624, 625, or 647 (Tables 15-65). In some embodiments, the prime editor comprises an amino acid sequence identical to any one of the sequences set forth in SEQ ID NOs: 25, 34, 35, 77, 78, 85, 86, 620, 622, 624, 625, or 647. In some embodiments, the prime editor comprises an amino acid sequence identical to any one of the sequences set forth in SEQ ID NOs: 25, 624, or 625. In some embodiments, the prime editor comprises an amino acid sequence identical to any one of the sequences set forth in SEQ ID NOs: 34, 35, 647. In some embodiments, the prime editor comprises an amino acid sequence identical to any one of the sequences set forth in SEQ ID NOs: 77, 78, or 620. In some embodiments, the prime editor comprises an amino acid sequence identical to any one of the sequences set forth in SEQ ID NOs: 85, 86, or 622. In some embodiments, the prime editor comprises an amino acid sequence identical to any one of the sequences listed in any of the tables 15-65. In some embodiments, the prime editor comprises an amino acid sequence identical to any one of the sequences listed in any of the tables 15-17. In some embodiments, the prime editor comprises an amino acid sequence identical to any one of the sequences listed in Table 15. In some embodiments, the prime editor comprises an amino acid sequence identical to any one of the sequences listed in Table 16. In some embodiments, the prime editor comprises an amino acid sequence identical to any one of the sequences listed in Table 17. In some embodiments, the prime editor comprises an amino acid sequence that lacks an N-terminus methionine compared to a corresponding prime editor sequence selected from any one of the sequences set forth in SEQ ID NO: 25, 34, 35, 43, 44, 52, 53, 61, 62, 63, 70-78, 85, 86, 93, 96, 99, 104, 105, 110, 111, 116, 117, 122, 125, 128, 131, 134, 137, 140, 143, 146, 149, 152, 155, 158, 161, 164, 170, 176, 179, 182, 185, 188, 191, 194, 197, 200, 203, 206, 209, 212, 215, 218, 221, 224, 227, 230, 620, 622, 624, or 625 (Tables 15-65).

[0136] In some embodiments, a prime editor comprises a fusion protein comprising the structure: N-Cas9 nickase-Peptide linker-RT-C. In some embodiments, a prime editor comprises a fusion protein comprising the structure: N-Cas9 nickase-Peptide linker-MMLV RT variant-C. In some embodiments, the Cas9 nickase comprises a mutation in the HNH domain and comprises an active RuvC domain. In some embodiments, the Cas9 nickase comprises a H840A mutation in the HHN domain. In some embodiments, the MMLV RT variant is MMLVRT_{5M}. In some embodiments, the MMLV RT variant is truncated between positions corresponding to positions 504 and 505 as compared to MMLVRT_{5M}. In some embodiments, the peptide linker comprises a sequence having at least about 80%, 81%, 82%, 83%, 84%, 85%, 86%, 87%, 88%, 80%, 90%, 91%, 92%, 93%, 94%, 95%, 96%, 97%, 98%, 99%, or 100% identity to a sequence selected from the group consisting of SEQ ID Nos 286-411. In some embodiments, the peptide linker comprises a sequence having at least about 80%, 81%, 82%, 83%, 84%, 85%, 86%, 87%, 88%, 80%, 90%, 91%, 92%, 93%, 94%, 95%, 96%, 97%, 98%, 99%, or 100% identity to a sequence selected from the group consisting of SEQ ID Nos 289-311. In some embodiments, the peptide linker comprises a sequence selected from the group consisting of SEQ ID Nos 289-311. In some embodiments, the peptide linker comprises a sequence having at least about 80%, 81%, 82%, 83%, 84%, 85%, 86%, 87%, 88%, 80%, 90%, 91%, 92%, 93%, 94%, 95%, 96%, 97%, 98%, 99%, or 100% identity to SEQ ID Nos 302. In some embodiments, the peptide linker comprises a sequence having at least about 80%, 81%, 82%, 83%, 84%, 85%, 86%, 87%, 88%, 80%, 90%, 91%, 92%, 93%, 94%, 95%, 96%, 97%, 98%, 99%, or 100% identity to SEQ ID 309. In some embodiments, the peptide linker comprises the sequence of SEQ ID No 302. In some embodiments, the peptide linker comprises the sequence of SEQ ID No 309. In some embodiments, the prime editor comprises a fusion protein comprising at least about 80%, 81%, 82%, 83%, 84%, 85%, 86%, 87%, 88%, 80%, 90%, 91%, 92%, 93%, 94%, 95%, 96%, 97%, 98%, 99%, or 100% identity to a sequence selected from the group consisting of SEQ ID Nos 78, 105, 117, 125, 131, 137, 143, 149, 155, 161, 167, 173, 179, 185, 191, 197, 203, 209, 215, 221, and 227. In some embodiments, the prime editor comprises a fusion protein comprising a sequence selected from the group consisting of SEQ ID Nos 78, 105, 117, 125, 131, 137, 143, 149, 155, 161, 167, 173, 179, 185, 191, 197, 203, 209, 215, 221, and 227. In some embodiments, the prime editor comprises a fusion protein comprising at least about 80%, 81%, 82%, 83%, 84%, 85%, 86%, 87%, 88%, 80%, 90%, 91%, 92%, 93%, 94%, 95%, 96%, 97%, 98%, 99%, or 100% identity to a sequence selected from the group consisting of SEQ ID Nos 86, 111, 122, 128, 134, 140, 146, 152, 158, 164, 170, 176, 182, 188, 194, 200, 206, 212, 218, 224, and 230. In some embodiments, the prime editor comprises a fusion protein comprising a sequence selected from the group consisting of SEQ ID Nos 86, 111, 122, 128, 134, 140, 146, 152, 158, 164, 170, 176, 182, 188, 194, 200, 206, 212, 218, 224, and 230. In some embodiments, the prime editor comprises a fusion protein that comprises a sequence having at least about 80%, 81%, 82%, 83%, 84%, 85%, 86%, 87%, 88%, 80%, 90%, 91%, 92%, 93%, 94%, 95%, 96%, 97%, 98%, 99%, or 100% identity to SEQ ID No 78. In some embodiments, the prime editor comprises a fusion protein comprising the sequence of SEQ ID NO: 78. In some embodiments, the prime editor comprises a fusion protein that comprises a sequence having at least about 80%, 81%, 82%, 83%, 84%, 85%, 86%, 87%, 88%, 80%, 90%, 91%, 92%, 93%, 94%, 95%, 96%, 97%, 98%, 99%, or 100% identity to SEQ ID No 86. In some embodiments, the prime editor comprises a fusion protein comprising the sequence of SEQ ID NO: 86.

[0137] In some embodiments, a prime editor comprises a fusion protein comprising the structure: N-terminal NLS-Cas9 nickase-Peptide linker-RT-C-terminal NLS. In some embodiments, a prime editor comprises a fusion protein comprising the structure: Cas9 nickase-peptide linker-MMLV RT variant. In some embodiments, the Cas9 nickase comprises a mutation in the HNH domain and comprises an active RuvC domain. In some embodiments, the Cas9 nickase comprises a H840A mutation in the HHN domain. In some embodiments, the MMLV RT variant is MMLVRT_{5M}. In some embodiments, the MMLV RT variant is truncated between positions corresponding to positions 504 and 505 as compared to MMLVRT_{5M}. In some embodiments, the peptide linker comprises a sequence having at least about 80%, 81%, 82%, 83%, 84%, 85%, 86%, 87%, 88%, 80%, 90%, 91%, 92%, 93%, 94%, 95%, 96%, 97%, 98%, 99%, or 100% identity to a sequence selected from the group consisting of SEQ ID Nos 286-411. In some embodiments, the peptide linker comprises a sequence having at least about 80%, 81%, 82%, 83%, 84%, 85%, 86%, 87%, 88%, 80%, 90%, 91%, 92%, 93%, 94%, 95%, 96%, 97%, 98%, 99%, or 100% identity to a sequence selected from the group consisting of SEQ ID Nos 289-311. In some embodiments, the peptide linker comprises a sequence selected from the group consisting of SEQ ID Nos 289-311. In some embodiments, the peptide linker comprises a sequence having at least about 80%, 81%, 82%, 83%, 84%, 85%, 86%, 87%, 88%, 80%, 90%, 91%, 92%, 93%, 94%, 95%, 96%, 97%, 98%, 99%, or 100% identity to SEQ ID Nos 302. In some embodiments, the peptide linker comprises a sequence having at least about 80%, 81%, 82%, 83%, 84%, 85%, 86%, 87%, 88%, 80%, 90%, 91%, 92%, 93%, 94%, 95%, 96%, 97%, 98%, 99%, or 100% identity to SEQ ID 309. In some embodiments, the peptide linker comprises the sequence of SEQ ID No 302. In some embodiments, the peptide linker comprises the sequence of SEQ ID No 309. In some embodiments, the N-terminal NLS or the C-terminal comprises a sequence having at least about 80%, 81%, 82%, 83%, 84%, 85%, 86%, 87%, 88%, 80%, 90%, 91%, 92%, 93%, 94%, 95%, 96%, 97%, 98%, 99%, or 100% identity to a sequence selected from SEQ ID Nos 11-24 and 621. In some embodiments, the N-terminal NLS comprises a sequence having at least about 80%, 81%, 82%, 83%, 84%, 85%, 86%, 87%, 88%, 80%, 90%, 91%, 92%, 93%, 94%, 95%, 96%, 97%, 98%, 99%, or 100% identity to a sequence selected from SEQ ID Nos 8-10 and 621. In some embodiments, the N-terminal NLS comprises a sequence selected from SEQ ID Nos 8-10 and 621. In some embodiments, the C-terminal NLS comprises the sequence of SEQ ID NO: 8. In some embodiments, the C-terminal NLS comprises the sequence of SEQ ID NO: 9. In some embodiments, the C-terminal NLS comprises a sequence having at least about 80%, 81%, 82%, 83%, 84%, 85%, 86%, 87%, 88%, 80%, 90%, 91%, 92%, 93%, 94%, 95%, 96%, 97%, 98%, 99%, or 100% identity to a sequence selected from SEQ ID Nos 11-24. In some embodiments, the C-terminal NLS comprises a sequence selected from SEQ ID Nos 11-24. In some embodiments, the C-terminal NLS comprises the sequence of SEQ ID NO: 11. In some embodiments, the C-terminal NLS comprises the sequence of SEQ ID NO: 24. In some embodiments, the prime editor comprises a fusion protein comprising at least about 80%, 81%, 82%, 83%, 84%, 85%, 86%, 87%, 88%, 80%, 90%, 91%, 92%, 93%, 94%, 95%, 96%, 97%, 98%, 99%, or 100% identity to a sequence selected from the group consisting of SEQ ID Nos 77, 93, 104, 620, and 116. In some embodiments, the prime editor comprises a fusion protein comprising a sequence selected from the group consisting of SEQ ID Nos 77, 93, 104, 620, and 116. In some embodiments, the prime editor comprises a fusion protein comprising at least about 80%, 81%, 82%, 83%, 84%, 85%, 86%, 87%, 88%, 80%, 90%, 91%, 92%, 93%, 94%, 95%, 96%, 97%, 98%, 99%, or 100% identity to a sequence selected from the group consisting of SEQ ID Nos 85, 96, 622, and 110. In some embodiments, the prime editor comprises a fusion protein comprising a sequence selected from the group consisting of SEQ ID Nos 85, 96, 622, and 110. In some embodiments, the prime editor comprises a fusion protein that comprises a sequence having at least about 80%, 81%, 82%, 83%, 84%, 85%, 86%, 87%, 88%, 80%, 90%, 91%, 92%, 93%, 94%, 95%, 96%, 97%, 98%, 99%, or 100% identity to SEQ ID No 77. In some embodiments, the prime editor comprises a fusion protein comprising the sequence of SEQ ID NO: 77 or 620. In some embodiments, the prime editor comprises a fusion protein that comprises a sequence having at least about 80%, 81%, 82%, 83%, 84%, 85%, 86%, 87%, 88%, 80%, 90%, 91%, 92%, 93%, 94%, 95%, 96%, 97%, 98%, 99%, or 100% identity to SEQ ID No 85 or 622. In some embodiments, the prime editor comprises a fusion protein comprising the sequence of SEQ ID NO: 85 or 622.

### Prime Editor Nucleotide Polymerase Domain

[0138] In some embodiments, a prime editor comprises a polypeptide domain (e.g., a DNA polymerase domain) comprising a DNA polymerase activity. In some embodiments, the prime editor comprises a polypeptide that comprises a DNA polymerase domain. In some embodiments, a prime editing composition comprises a polynucleotide that encodes a polymerase domain, e.g., a DNA polymerase domain. In some embodiments, a prime editor comprises a nucleotide polymerase domain, e.g., a DNA polymerase domain. In some embodiments, the DNA polymerase domain can be a wild-type DNA polymerase domain, a full-length DNA polymerase protein domain, or can be a functional mutant, a functional variant, or a functional fragment thereof. In some embodiments, the DNA polymerase domain is a template dependent DNA polymerase domain. For example, the DNA polymerase can rely on a template polynucleotide strand, e.g., the editing template sequence, for new strand DNA synthesis. In some embodiments, the prime editor comprises a DNA polymerase domain that is a DNA-dependent DNA polymerase. For example, a prime editor having a DNA-dependent DNA polymerase can synthesize a new single stranded DNA using a PEgRNA editing template that comprises a DNA sequence as a template. In such cases, the PEgRNA is a chimeric or hybrid PEgRNA, and comprising an extension arm comprising a DNA strand. In some embodiments, the chimeric or hybrid PEgRNA can comprise an RNA portion (including the spacer and the gRNA core) and a DNA portion (the extension arm comprising the editing template that includes a strand of DNA).

[0139] In some embodiments, the prime editor comprises a DNA polymerase domain that is a RNA-dependent DNA polymerase. In some embodiments, the DNA polymerase domain can be a wild type polymerase, for example, from eukaryotic, prokaryotic, archaeal, or viral organisms. In some embodiments, the DNA polymerase domain is a modified DNA polymerase, for example, a wild-type DNA polymerase that is modified by genetic engineering, mutagenesis, or directed evolution-based processes.

[0140] In some embodiments, the DNA polymerase is a bacteriophage polymerase, for example, a T4, T7, or phi29 DNA polymerase. In some embodiments, the DNA polymerase is an archaeal polymerase, for example, pol I type archaeal polymerase or a pol II type archaeal polymerase. In some embodiments, the DNA polymerase comprises a thermostable archaeal DNA polymerase. In some embodiments, the DNA polymerase comprises a eubacterial DNA polymerase, for example, Pol I, Pol II, or Pol III polymerase. In some embodiments, the DNA polymerase is a Pol I family DNA polymerase. In some embodiments, the DNA polymerase comprises is a E. coli Pol I DNA polymerase. In some embodiments, the DNA polymerase is a Pol II family DNA polymerase. In some embodiments, the DNA polymerase is a Pyrococcus furiosus (Pfu) Pol II DNA polymerase. In some embodiments, the DNA Polymerase is a Pol IV family DNA polymerase. In some embodiments, the DNA polymerase is a E. coli Pol IV DNA polymerase.

[0141] In some embodiments, the DNA polymerase is an eukaryotic DNA polymerase. In some embodiments, the DNA polymerase is a Pol-beta DNA polymerase, a Pol-lambda DNA polymerase, a Pol-sigma DNA polymerase, or a Pol-mu DNA polymerase. In some embodiments, the DNA polymerase is a Pol-alpha DNA polymerase. In some embodiments, the DNA polymerase is a POLA1 DNA polymerase. In some embodiments, the DNA polymerase is a POLA2 DNA polymerase. In some embodiments, the DNA polymerase is a Pol-delta DNA polymerase. In some embodiments, the DNA polymerase is a POLD1 DNA polymerase. In some embodiments, the DNA polymerase is a POLD2 DNA polymerase. In some embodiments, the DNA polymerase is a human POLD1 DNA polymerase. In some embodiments, the DNA polymerase is a human POLD2 DNA polymerase. In some embodiments, the DNA polymerase is a POLD3 DNA polymerase. In some embodiments, the DNA polymerase is a POLD4 DNA polymerase. In some embodiments, the DNA polymerase is a Pol-epsilon DNA polymerase. In some embodiments, the DNA polymerase is a POLE1 DNA polymerase. In some embodiments, the DNA polymerase is a POLE2 DNA polymerase. In some embodiments, the DNA polymerase is a POLE3 DNA polymerase. In some embodiments, the DNA polymerase is a Pol-eta (POLH) DNA polymerase. In some embodiments, the DNA polymerase is a Pol-iota (POLI) DNA polymerase. In some embodiments, the DNA polymerase is a Pol-kappa (POLK) DNA polymerase. In some embodiments, the DNA polymerase is a Rev1 DNA polymerase. In some embodiments, the DNA polymerase is a human Rev1 DNA polymerase. In some embodiments, the DNA polymerase is a viral DNA-dependent DNA polymerase. In some embodiments, the DNA polymerase is a B family DNA polymerases. In some embodiments, the DNA polymerase is a herpes simplex virus (HSV) UL30 DNA polymerase. In some embodiments, the DNA polymerase is a cytomegalovirus (CMV) UL54 DNA polymerase.

[0142] In some embodiments, the DNA polymerase is an archaeal polymerase. In some embodiments, the DNA polymerase is a Family B/pol I type DNA polymerase. For example, in some embodiments, the DNA polymerase is a homolog of Pfu from Pyrococcus furiosus. In some embodiments, the DNA polymerase is a pol II type DNA polymerase. For example, in some embodiments, the DNA polymerase is a homolog of P. furiosus DP1/DP2 2-subunit polymerase. In some embodiments, the DNA polymerase lacks 5′ to 3′ nuclease activity. Suitable DNA polymerases (pol I or pol II) can be derived from archaea with optimal growth temperatures that are similar to the desired assay temperatures.

[0143] In some embodiments, the DNA polymerase is a thermostable archaeal DNA polymerase. In some embodiments, the thermostable DNA polymerase is isolated or derived from Pyrococcus species (furiosus, species GB-D, woesii, abysii, horikoshii), Thermococcus species (kodakaraensis KOD1, litoralis, species 9 degrees North-7, species JDF-3, gorgonarius), Pyrodictium occultum, and Archaeoglobus fulgidus.

[0144] Polymerases may also be from eubacterial species. In some embodiments, the DNA polymerase is a Pol I family DNA polymerase. In some embodiments, the DNA polymerase is an E. coli Pol I DNA polymerase. In some embodiments, the DNA polymerase is a Pol II family DNA polymerase. In some embodiments, the DNA polymerase is a Pyrococcus furiosus (Pfu) Pol II DNA polymerase. In some embodiments, the DNA Polymerase is a Pol III family DNA polymerase. In some embodiments, the DNA Polymerase is a Pol IV family DNA polymerase. In some embodiments, the DNA polymerase is an E. coli Pol IV DNA polymerase. In some embodiments, the Pol I DNA polymerase is a DNA polymerase functional variant that lacks or has reduced 5′ to 3′ exonuclease activity. Suitable thermostable pol I DNA polymerases can be isolated from a variety of thermophilic eubacteria, including Thermus species and Thermotoga maritima such as Thermus aquaticus (Taq), Thermus thermophilus (Tth) and Thermotoga maritima (Tma UlTma).

[0145] In some embodiments, a prime editor comprises an RNA-dependent DNA polymerase domain, for example, a reverse transcriptase (RT). In some embodiments, the DNA polymerase domain is an RNA-dependent DNA polymerase domain, for example, a reverse transcriptase (RT). In some embodiments, the DNA polymerase domain is a reverse transcriptase (RT) domain, for example, a reverse transcriptase (RT). In some embodiments, the reverse transcriptase (RT), or a RT domain is a M-MLV RT (e.g., a wild-type M-MLV RT, a reference M-MLV RT, a functional mutant, a functional variant, or a functional fragment thereof). An RT or an RT domain can be a wild-type RT domain, a full-length RT domain, or may be a functional mutant, a functional variant, or a functional fragment thereof. An RT or an RT domain of a prime editor can comprise a wild-type RT a full length RT, a functional mutant, a functional variant, or a functional fragment thereof or can be engineered or evolved to contain specific amino acid substitutions, truncations, or variants. An engineered RT can comprise sequences or amino acid changes different from a naturally occurring RT or a corresponding reference RT. In some embodiments, the engineered RT can have improved reverse transcription activity over a naturally occurring RT or RT domain. In some embodiments, the engineered RT can have improved features over a naturally occurring RT, for example, improved thermostability, reverse transcription efficiency, or target fidelity. In some embodiments, a prime editor comprising the engineered RT has improved prime editing efficiency over a prime editor having a reference naturally occurring RT.

[0146] In some embodiments, the reverse transcriptase domain or RT can be between 200 and 800 amino acids in length, between 300 and 700 amino acids in length, or at least 400 and 600 amino acids in length. In some embodiments, the reverse transcriptase domain or RT can be at least 200 amino acids in length, at least 300 amino acids in length, at least 400 amino acids in length, at least 500 amino acids in length, or at least 600 amino acids in length. In some embodiments, the reverse transcriptase domain or RT is 250 amino acids in length. In some embodiments, the reverse transcriptase domain or RT is 350 amino acids in length. In some embodiments, the reverse transcriptase domain or RT is 450 amino acids in length. In some embodiments, the reverse transcriptase domain or RT is 550 amino acids in length. In some embodiments, the reverse transcriptase domain or RT is 650 amino acids in length.

[0147] In some embodiments, a prime editor comprises a eukaryotic RT, for example, a yeast, drosophila, rodent, or primate RT. In some embodiments, the prime editor comprises a Group II intron RT, for example, a. Geobacillus stearothermophilus Group II Intron (GsI-IIC) RT or a Eubacterium rectale group II intron (Eu.re.I2) RT. In some embodiments, the prime editor comprises a retron RT.

[0148] In some embodiments, a prime editor comprises a virus RT, for example, a retrovirus RT. Non-limiting examples of virus RT include Moloney murine leukemia virus (M-MLV or MLVRT); human T-cell leukemia virus type 1 (HTLV-1) RT; bovine leukemia virus (BLV) RT; Rous Sarcoma Virus (RSV) RT; human immunodeficiency virus (HIV) RT, M-MFV RT, Avian Sarcoma-Leukosis Virus (ASLV) RT, Rous Sarcoma Virus (RSV) RT, Avian Myeloblastosis Virus (AMV) RT, Avian Erythroblastosis Virus (AEV) Helper Virus MCAV RT, Avian Myelocytomatosis Virus MC29 Helper Virus MCAV RT, Avian Reticuloendotheliosis Virus (REV-T) Helper Virus REV-A RT, Avian Sarcoma Virus UR2 Helper Virus (UR2AV) RT, Avian Sarcoma Virus Y73 Helper Virus YAV RT, Rous Associated Virus (RAV) RT, and Myeloblastosis Associated Virus (MAV) RT, all of which may be suitably used in the methods and composition described herein.

[0149] In some embodiments, the prime editor comprises a wild-type M-MLV RT, a reference M-MLV RT, a functional mutant, a functional variant, or a functional fragment thereof. In some embodiments, the RT domain or a RT is a M-MLV RT (e.g., wild-type M-MLV RT, a reference M-MLV RT, a functional mutant, a functional variant, or a functional fragment thereof). In some embodiments, a reference M-MLV RT is a wild-type M-MLV RT. An exemplary sequence of a wild-type M-MLV RT is provided in SEQ ID NO:623. An exemplary sequence of a reference M-MLV RT is provided in SEQ ID NO: 1. Exemplary MMLV-RT amino acid and nucleotide sequences are disclosed in Table 67. In some embodiments, the MMLVRT variant comprises D200N, T306K, W313F, T330P, and L603W amino acid substitutions as compared to reference MMLVRT sequence SEQ ID No 1. The variant, having the sequence of SEQ ID NO: 5, is referred to here in as “MMLVRT_{5M}” or or “MMLVRT5M”.

[0150] In some embodiments, a prime editor comprises an RT that comprises an engineered RNase domain compared to a corresponding reference RT (e.g., a reference M-MLV RT or a wild-type M-MLV RT). In some embodiments, the RT of the prime editor comprises one or more amino acid substitutions, insertions, or deletions compared to a reference RT. In some embodiments, the RT of the prime editor is truncated compared to a corresponding reference RT (e.g., a reference M-MLV RT or a wild-type M-MLV RT). A polypeptide is “truncated” when, compared to a reference polypeptide sequence, the polypeptide lacks an end portion, for example, a N-terminal portion or a C-terminal portion. A polypeptide is truncated after amino acid position n means that the polypeptide, compared to a reference polypeptide sequence, lacks amino acids that are C-terminal to amino acid n or corresponding amino acids thereof, but retains amino acid n. In other words, “truncated after amino acid at position n” or “truncated at C terminus between positions n and n+1” refers to a truncation of a polypeptide between positions n and n+1, wherein amino acids that are C-terminal to amino acid n are deleted compared to a reference polypeptide sequence. In some embodiments, a polypeptide truncated after amino acid n, when compared to a reference polypeptide sequence, comprises amino acid n and all amino acids N terminal to amino acid n and lacks amino acids C terminal to amino acid n, or corresponding amino acids thereof.

[0151] In some embodiments, a polypeptide truncated before amino acid n, or a polypeptide truncated at N terminus between positions n−1 and n, when compared to a reference polypeptide sequence, comprises amino acid n and all amino acids C terminal to amino acid n and lacks amino acids N terminal to amino acid n, or corresponding amino acids thereof. In some embodiments, a truncated polypeptide is truncated at the N terminus, at the C terminus, or both the N terminus and the C terminus. A C terminal truncated polypeptide may also be truncated at its N terminus. An N terminal truncated polypeptide may also be truncated at its C terminus. In some embodiments, the RT of the prime editor consists of 95%, 90%, 85%, 80%, 75%, 70%, 65%, 60%, 55%, 50%, 45%, 40%, 35%, 30%, 25%, 20%, 15% or 10% of amino acids of a corresponding reference RT. In some embodiments, the prime editor comprises a truncated RT compared to a corresponding reference RT, wherein the truncation is at the N-terminus of the RT. In some embodiments, the prime editor comprises a truncated RT compared to a corresponding reference RT, wherein the truncation is at the C-terminus of RT. In some embodiments, the prime editor comprises a truncated RT compared to a corresponding reference RT, wherein the truncation is within the middle of corresponding reference RT. In some embodiments, the prime editor comprises a truncated RT compared to a corresponding reference RT, wherein the RT domain is truncated at both the N-terminus and the C-terminus. In some embodiments, the prime editor comprises a truncated RT compared to a corresponding reference RT, wherein the RT is truncated at the N-terminus, the C-terminus, and/or the middle of the RT referenced by the corresponding RT. In some embodiments, about 1, 2, 3, 4, 5, 6, 7, 8, 9, 10, 11, 12, 13, 14, 15, 16, 17, 18, 19, 20, 25, 30, 35, 40, 45, 50, 55, 60, 65, 70, 75, 80, 85, 90, 95, 100, 110, 120, 130, 140, 150, 160, 170, 180, 190, 200, 210, 220, 230, 240, 250, 260, 270, 280, 290, 300, 310, 320, 330, 340, 350, 360, 370, 380, 390, 400, 410, 420, 430, 440, 450, 460, 470, 480, 490, 500, 510, 520, 530, 540, 550 or more amino acids are truncated at the N-terminus of the RT in a prime editor compared to a corresponding reference RT. In some embodiments, about 1, 2, 3, 4, 5, 6, 7, 8, 9, 10, 11, 12, 13, 14, 15, 16, 17, 18, 19, 20, 25, 30, 35, 40, 45, 50, 55, 60, 65, 70, 75, 80, 85, 90, 95, 100, 110, 120, 130, 140, 150, 160, 170, 180, 190, 200, 210, 220, 230, 240, 250, 260, 270, 280, 290, 300, 310, 320, 330, 340, 350, 360, 370, 380, 390, 400, 410, 420, 430, 440, 450, 460, 470, 480, 490, 500, 510, 520, 530, 540, 550 or more amino acids are truncated at the C-terminus of the RT in a prime editor compared a corresponding reference RT. In some embodiments, a reference RT sequence has the sequence of SEQ ID NO: 1. In some embodiments, a reference RT sequence has the sequence of SEQ ID NO: 5.

[0152] In some embodiments, a prime editor comprises an RT that is a Moloney murine leukemia virus (M-MLV) reverse transcriptase (M-MLV RT). In some embodiments, the M-MLV RT of the prime editor comprises one or more amino acid substitutions, insertions, or deletions compared to a wild-type M-MLV RT, a reference M-MLV RT, or MMLVRT_{5M}. In some embodiments, a prime editor comprises a truncated M-MLV RT compared to a wild-type M-MLV RT or a reference M-MLV RT or MMLVRT_{5M}. In some embodiments, the M-MLV RT of the prime editor consists of 95%, 90%, 85%, 80%, 75%, 70%, 65%, 60%, 55%, 50%, 45%, 40%, 35%, 30%, 25%, 20%, 15% or 10% of amino acids of a wild-type M-MLV RT or a reference M-MLV RT or MMLVRT_{5M}. In some embodiments, the M-MLV RT of the prime editor is truncated at the N-terminus compared to a wild-type M-MLV RT or a reference M-MLV RT, or MMLVRT_{5M}. In some embodiments, the M-MLV RT of the prime editor is truncated at the C-terminus compared to a wild-type M-MLV RT or a reference M-MLV RT, or MMLVRT_{5M}. In some embodiments, the M-MLV RT of the prime editor is truncated compared to a wild-type M-MLV RT or a reference M-MLV RT, wherein the truncation is within the middle of the RT referenced by a wild-type M-MLV RT or a reference M-MLV RT, or MMLVRT_{5M}. In some embodiments, the M-MLV RT of the prime editor comprises a truncated M-MLV RT compared to a wild-type M-MLV RT or a reference M-MLV RT, or MMLVRT_{5M} wherein RT is truncated at both the N-terminus and the C-terminus. In some embodiments, the M-MLV RT of the prime editor comprises a truncated M-MLV RT compared to a wild-type M-MLV RT or a reference M-MLV RT, or or MMLVRT_{5M}, wherein the RT is truncated at the N-terminus, the C-terminus, and/or the middle of the RT as reference by a wild-type M-MLVRT or a reference M-MLV RT., or MMLVRT_{5M}

[0153] In some embodiments, about 1, 2, 3, 4, 5, 6, 7, 8, 9, 10, 11, 12, 13, 14, 15, 16, 17, 18, 19, 20, 25, 30, 35, 40, 45, 50, 55, 60, 65, 70, 75, 80, 85, 90, 95, 100, 110, 120, 130, 140, 150, 160, 170, 180, 190, 200, 210, 220, 230, 240, 250, 260, 270, 280, 290, 300, 310, 320, 330, 340, 350, 360, 370, 380, 390, 400, or more amino acids are truncated at the N-terminus of the M-MLV RT in a prime editor compared to a wild-type M-MLV RT or a reference M-MLV RT or MMLVRT_{5M}. In some embodiments, about 1, 2, 3, 4, 5, 6, 7, 8, 9, 10, 11, 12, 13, 14, 15, 16, 17, 18, 19, 20, 25, 30, 35, 40, 45, 50, 55, 60, 65, 70, 75, 80, 85, 90, 95, 100, 110, 120, 130, 140, 150, 160, 170, 180, 190, 200, 210, 220, 230, 240, 250, 260, 270, 280, 290, 300, 310, 320, 330, 340, 350, 360, 370, 380, 390, 400, 410, 420, 430, 440, 450, 460, 470, 480, 490, 500, 510, 520, 530, 540, 550 or more amino acids are truncated at the C-terminus of the M-MLV RT in a prime editor compared a wild-type M-MLV RT or a reference M-MLV RT or MMLVRT_{5M}.

[0154] In some embodiments, a prime editor comprises a reverse transcriptase (RT) that comprises a RNase domain. For example, in some embodiments, the RT of the prime editor is a virus RT domain that comprises a RNase domain. In some embodiments, the RT of the prime editor is a virus RT domain that comprises a RNase H domain. In some embodiments, the RT of the prime editor comprises a RNase H domain having 5′ and/or 3′ ribonuclease activity. In some embodiments, the RT of the prime editor comprises a RNase H domain having 3′ and/or 5′ nuclease activity toward the RNA strand when contacted with a DNA-RNA hybrid double strand.

[0155] In some embodiments, a prime editor comprises an RT that comprises an engineered RNase domain compared to a corresponding reference RT. In some embodiments, a prime editor comprises a RT that comprises an engineered RNase H domain compared to a corresponding reference RT. In some embodiments, the RT of the prime editor comprises one or more amino acid substitutions, insertions, or deletions in the RNase H domain compared to a corresponding. In some embodiments, the one or more amino acid substitutions, insertions, or deletions in the RNase H domain reduces or abolishes RNase activity of the RNase H domain. In some embodiments, the RT of the prime editor comprises a RNase H domain that has decreased or abolished RNase activity. In some embodiments, the RT of the prime editor comprises an inactivated RNase H domain. In some embodiments, the RT of the prime editor comprises one or more amino acid substitutions in a RNase H domain that decrease or abolish activity of the RNase H domain as compared to a corresponding reference RT. In some embodiments, the RT of the prime editor comprises a truncated RNase H domain compared to a corresponding reference RT. In some embodiments, the truncation in the RNase H domain decreases or abolishes RNase activity of the RNase H domain. In some embodiments, the RT of the prime editor comprises a RNase H domain that consists of 95%, 90%, 85%, 80%, 75%, 70%, 65%, 60%, 55%, 50%, 45%, 40%, 35%, 30%, 25%, 20%, 15% or 10% of amino acids of a corresponding wild-type RNase H domain (e.g., a wild-type RNase H domain from a reference M-MLV RT or a wild-type M-MLV RT or MMLVRT_{5M}). In some embodiments, a reference RT sequence has the sequence of SEQ ID NO: 1. In some embodiments, a reference RT sequence has the sequence of SEQ ID NO: 5.

[0156] In some embodiments, the RT of the prime editor comprises a truncated RNase H domain compared to a corresponding reference RT, wherein the truncation is at the N-terminus of the RNase H domain. In some embodiments, the RT of the prime editor comprises a truncated RNase H domain compared to a corresponding reference RT, wherein the truncation is at the C-terminus of the RNase H domain. In some embodiments, the RT of the prime editor comprises a truncated RNase H domain compared to a corresponding reference RT, wherein the truncation is within the middle of the RNase H domain referenced by the RNase H domain of the corresponding reference RT. In some embodiments, the RT of the prime editor comprises a truncated RNase H domain compared to a corresponding reference RT, wherein the truncated RNase H domain is truncated at both the N-terminus and the C-terminus of the RNase H domain. In some embodiments, the RT of the prime editor comprises a truncated RNase H domain compared to a corresponding reference RT, wherein the truncated RNase H domain is truncated at the N-terminus, the C-terminus, and/or the middle of the RNase H domain referenced by the RNase H domain of the corresponding reference RT. In some embodiments, about 1, 2, 3, 4, 5, 6, 7, 8, 9, 10, 11, 12, 13, 14, 15, 16, 17, 18, 19, 20, 25, 30, 35, 40, 45, 50, 55, 60, 65, 70, 75, 80, 85, 90, 95, 100, 110, 120, 130, 140, 150, 160, 170, 180, 190, 200, 210, 220, 230, 240, 250, 260, 270, 280, 290, 300, 310, 320, 330, 340, 350, 360, 370, 380, 390, 400, 410, 420, 430, 440, 450, 460, 470, 480, 490, 500, 510, 520, 530, 540, 550 or more amino acids are truncated at the N-terminus of the RNase H domain of the RT in a prime editor compared to the RNase H domain of a corresponding reference RT. In some embodiments, about 1, 2, 3, 4, 5, 6, 7, 8, 9, 10, 11, 12, 13, 14, 15, 16, 17, 18, 19, 20, 25, 30, 35, 40, 45, 50, 55, 60, 65, 70, 75, 80, 85, 90, 95, 100, 110, 120, 130, 140, 150, 160, 170, 180, 190, 200, 210, 220, 230, 240, 250, 260, 270, 280, 290, 300, 310, 320, 330, 340, 350, 360, 370, 380, 390, 400, 410, 420, 430, 440, 450, 460, 470, 480, 490, 500, 510, 520, 530, 540, 550 or more amino acids are truncated at the C-terminus of the RNase H domain of the RT in a prime editor compared to the RNase H domain of a corresponding reference RT. In some embodiments, the RT of the prime editor lacks a RNase H domain. In some embodiments, a reference RT sequence has the sequence of SEQ ID NO: 1. In some embodiments, a reference RT sequence has the sequence of SEQ ID NO: 5.

[0157] In some embodiments, a prime editor comprises an RT that is a Moloney murine leukemia virus (M-MLV) reverse transcriptase (M-MLV RT) that comprises an RNase H domain. In some embodiments, the M-MLV RT of the prime editor comprises one or more amino acid substitutions, insertions, or deletions in the RNase H domain compared to the RNase H domain of a wild-type M-MLV RT. In some embodiments, the one or more amino acid substitutions, insertions, or deletions in the RNase H domain reduces or abolishes RNase activity of the RNase H domain. In some embodiments, the M-MLV RT of the prime editor comprises a RNase H domain that has decreased or abolished RNase activity compared to a RNase H domain in a wild-type M-MLV RT. In some embodiments, the M-MLV RT of the prime editor comprises an inactivated RNase H domain.

[0158] In some embodiments, a prime editor comprises a M-MMLV RT comprising one or more of amino acid substitutions P51$, S67, E69$, L139$, T197$, D200$, H204$, F209$, E302$, T306$, F309$, W313$, T330$, L345$, L435$, N454$, D524$, E562$, D583$, H594$, L603$, E607$, or D653$ as compared to a reference M-MMLV RT as set forth in SEQ ID NO:1, where $ is any amino acid other than the wild-type amino acid. In some embodiments, the prime editor comprises a M-MMLV RT comprising one or more of amino acid substitutions P51L, S67K, E69K, L139P, T197A, D200N, H204R, F209N, E302K, E302R, T306K, F309N, W313F, T330P, L345G, L435G, N454K, D524G, E562Q, D583N, H594Q, L603W, E607K, and D653N as compared to a reference M-MMLV RT as set forth in SEQ ID NO: 1. In some embodiments, the prime editor comprises a M-MLV RT comprising one or more amino acid substitutions D200N, T330P, L603W, T306K, and W313F as compared to a reference M-MMLV as set forth in SEQ ID NO:1. In some embodiments, the prime editor comprises a M-MLV RT comprising amino acid substitutions D200N, T330P, L603W, T306K, and W313F as compared to a reference M-MMLV RT as set forth in SEQ ID NO:1.

[0159] In some embodiments, a prime editor comprising a reverse transcriptase harboring the D200N, T330P, L603W, T306K, and W313F as compared to the reference M-MMLV RT set forth in SEQ ID NO: 1, maybe referred to as a “PE2” prime editor, and the corresponding prime editing system a PE2 prime editing system. In some embodiments, a prime editor comprises a M-MMLV RT comprising one or more of amino acid substitutions D200N, T306K, W313F, T330P, L603W, or any combination thereof as compared to the reference M-MMLV RT as set forth in SEQ ID NO: 1, or SEQ ID NO: 623, where X is any amino acid other than the wild-type amino acid. In some embodiments, a prime editor comprises a M-MMLV RT comprising one or more of amino acid substitutions Y134X, Y272X, L435X, D524X, or any combination thereof as compared to the reference M-MMLV RT as set forth in SEQ ID NO: 1, or SEQ ID NO: 623, where X is any amino acid other than the wild-type amino acid. In some embodiments, a prime editor comprises a M-MMLV RT comprising one or more of amino acid substitutions Y134R, Y272R, L435K, D524N, or any combination thereof as compared to the reference M-MMLV RT as set forth in SEQ ID NO: 1, or SEQ ID NO: 623, where X is any amino acid other than the wild-type amino acid

[0160] In some embodiments, the MMLVRT variant comprises one or more of D200N, T306K, W313F, T330P, and L603W amino acid substitutions as compared to reference MMLVRT sequence SEQ ID No 1. In some embodiments, the MMLVRT variant comprises D200N, T306K, W313F, T330P, and L603W amino acid substitutions as compared to reference MMLVRT sequence SEQ ID No 1. In some embodiments, the MMLV RT variant comprises one or more of D524N, L435K, Y133R, Y271R amino acid substitution as compared to reference MMLVRT sequence SEQ ID No 1. In some embodiments, the MMLV RT variant has one or more amino acid deletion compared to the reference MMLVRT sequence SEQ ID No 1. For example, in some embodiments, the MMLV RT variant is truncated at the C terminus between positions corresponding to amino acids 504 and 505 as set forth in SEQ ID NO: 1 (such truncation may be referred to herein as a 504X, or G504X truncation). In some embodiments, the MMLV RT variant is truncated at the C terminus between positions corresponding to amino acids 478 and 479 as set forth in SEQ ID NO: 1 (a L478X truncation). In some embodiments, the MMLV RT variant is truncated at the C terminus at any amino acid position between positions 478 and 505 as set forth in SEQ ID NO:1. In some embodiments, the MMLV RT variant is truncated at the C terminus between positions corresponding to amino acids 365 and 366 as set forth in SEQ ID NO: 1 (a P365X truncation). In some embodiments, the MMLV RT variant is truncated at the C terminus between positions corresponding to amino acids 278 and 279 as set forth in SEQ ID NO: 1 (a R278X truncation). In some embodiments, the MMLV RT variant is truncated at the C terminus between positions corresponding to amino acids 328 and 329 as set forth in SEQ ID NO: 1 (a T328X truncation). In some embodiments, the MMLV RT variant is truncated at the C terminus between positions corresponding to amino acids 378 and 379 as set forth in SEQ ID NO: 1 (a K478X truncation). In some embodiments, the MMLV RT variant is truncated at the C terminus between positions corresponding to amino acids 428 and 429 as set forth in SEQ ID NO: 1 (a M428X truncation). In some embodiments, the truncated M-MLV RT variants further comprise a D200$, T306$, W313$, and/or T330$ amino acid substitution compared to a corresponding reference M-MLV RT as set forth in SEQ ID NO: 1, wherein $ is any amino acid other than the original amino acid. In some embodiments, the truncated M-MLV RT variants further comprise a D200N, T306K, W313F, and/or T330P amino acid substitution compared to a corresponding reference M-MLV RT as set forth in SEQ ID NO: 1. In some embodiments, a prime editor polypeptide comprises a DNA polymerase domain (e.g., a MMLV-RT) comprising an amino acid sequence that is at least 80%, at least 81%, at least 82%, at least 83%, at least 84%, at least 85%, at least 86%, at least 87%, at least 88%, at least 89%, at least 90%, at least 91%, at least 92%, at least 93%, at least 94%, at least 95%, at least 96%, at least 97%, at least 98%, at least 99% identical, or 100% identical to any one of the amino acid sequences recited in Table 67 or to any one of amino acid sequences set forth in SEQ ID NOs: 1, 4, 5, 36, 45, 54, 63, or 623. In some embodiments, a prime editor polypeptide comprises a MMLV-RT domain comprising an amino acid sequence SEQ ID NOs: 5. In some embodiments, a prime editor polypeptide comprises a C-terminal truncated MMLV-RT domain having the amino acid sequence of SEQ ID NO: 36.

[0161] In some embodiments, a M-MLV RT comprises an amino acid sequence that is at least about 85%, at least 86%, at least 87%, at least 88%, at least 89%, at least 90%, at least 91%, at least 92%, at least 93%, at least 94%, at least 95%, at least 96%, at least 97%, at least 98%, at least 99% identical to any one of the sequences set forth in SEQ ID NOs: 1, 4, 5, 36, 45, 54, 63, or 623. In some embodiments, the M-MLV RT comprises an amino acid sequence set forth in SEQ ID NO: 1. In some embodiments, the M-MLV RT comprises an amino acid sequence set forth in SEQ ID NO: 623. In some embodiments, the M-MLV RT comprises an amino acid sequence set forth in SEQ ID NO: 623. In some embodiments, the M-MLV RT comprises an amino acid sequence set forth in SEQ ID NO: 4. In some embodiments, the M-MLV RT comprises an amino acid sequence set forth in SEQ ID NO: 5. In some embodiments, the M-MLV RT comprises an amino acid sequence set forth in SEQ ID NO: 36. In some embodiments, the M-MLV RT comprises an amino acid sequence set forth in SEQ ID NO: 45. In some embodiments, the M-MLV RT comprises an amino acid sequence set forth in SEQ ID NO: 54. In some embodiments, the M-MLV RT comprises an amino acid sequence set forth in SEQ ID NO: 63. In some embodiments, a prime editing composition comprises a polynucleotide encoding a DNA polymerase domain that comprises an amino acid sequence that is at least about 85%, at least 86%, at least 87%, at least 88%, at least 89%, at least 90%, at least 91%, at least 92%, at least 93%, at least 94%, at least 95%, at least 96%, at least 97%, at least 98%, at least 99% identical to any one of the sequences set forth in SEQ ID NOs: 1, 4, 5, 36, 45, 54, 63, or 623.

[0162] In some embodiments, an RT variant may be a functional fragment of a corresponding RT (e.g., a M-MLV RT) that has 1, 2, 3, 4, 5, 6, 7, 8, 9, 10, 11, 12, 13, 14, 15, 16, 17, 18, 19, 20, 21, 22, 21, 24, 25, 26, 27, 28, 29, 30, 31, 32, 33, 34, 35, 36, 37, 38, 39, 40, 41, 42, 43, 44, 45, 46, 47, 48, 49, 50, or up to 100, or up to 200, or up to 300, or up to 400, or up to 500 or more amino acid changes compared to a corresponding RT, e.g., (e.g., a M-MLV RT). In some embodiments, the RT variant comprises a fragment of a corresponding RT, e.g., a (e.g., a M-MLV RT), such that the fragment is about 70% identical, about 80% identical, about 90% identical, about 95% identical, about 96% identical, about 97% identical, about 98% identical, about 99% identical, about 99.5% identical, or about 99.9% identical to the corresponding fragment of the corresponding RT. In some embodiments, the fragment is 30%, 35%, 40%, 45%, 50%, 55%, 60%, 65%, 70%, 75%, 80%, 85%, 90%, 95% identical, 96%, 97%, 98%, 99%, or 99.5% of the amino acid length of a corresponding RT (e.g., a M-MLV RT).

[0163] In some embodiments, the RT functional fragment is at least 100 amino acids in length. In some embodiments, the fragment is at least 100, 150, 200, 250, 300, 350, 400, 450, 500, 550, or up to 600 or more amino acids in length.

[0164] In some embodiments, a prime editor comprises a eukaryotic RT, for example, a yeast, drosophila, rodent, or primate RT. In some embodiments, the prime editor comprises a Group II intron RT, for example, a. Geobacillus stearothermophilus Group II Intron (GsI-IIC) RT or a Eubacterium rectale group II intron (Eu.re.I2) RT. In some embodiments, the prime editor comprises a retron RT.

[0165] In some embodiments, a M-MLV RT of a prime editor comprises a Y133$ amino acid substitution as compared to a reference M-MLV RT as set forth in SEQ ID NO: 1, SEQ ID NO: 5, or SEQ ID NO: 623, wherein $ is any amino acid except for Y. In some embodiments, the M-MLV RT of the prime editor comprises a Y133R amino acid substitution as compared to a reference M-MLV RT as set forth in SEQ ID NO: 1, SEQ ID NO: 5, or SEQ ID NO: 623.

[0166] In some embodiments, a M-MLV RT of a prime editor comprises a Y271$ amino acid substitution as compared to a reference M-MLV RT as set forth in SEQ ID NO: 1, SEQ ID NO: 5, or SEQ ID NO: 623, wherein $ is any amino acid except for Y.

[0167] In some embodiments, the M-MLV RT of the prime editor comprises a Y271R amino acid substitution as compared to a reference M-MLV RT as set forth in SEQ ID NO: 1, SEQ ID NO: 5, or SEQ ID NO: 623.

[0168] In some embodiments, a M-MLV RT of a prime editor comprises a D524$ amino acid substitution as compared to a reference M-MLV RT as set forth in SEQ ID NO: 1, SEQ ID NO: 5, or SEQ ID NO: 623, wherein $ is any amino acid except for D. In some embodiments, the M-MLV RT of the prime editor comprises a D524N amino acid substitution as compared to a reference M-MLV RT as set forth in SEQ ID NO: 1, SEQ ID NO: 5, or SEQ ID NO: 623.

[0169] In some embodiments, a M-MLV RT of a prime editor comprises a L435$ amino acid substitution as compared to a reference M-MLV RT as set forth in SEQ ID NO: 1, SEQ ID NO: 5, or SEQ ID NO: 623, wherein $ is any amino acid except for L. In some embodiments, the M-MLV RT of the prime editor comprises a L435K amino acid substitution as compared to a reference M-MLV RT as set forth in SEQ ID NO: 1, SEQ ID NO: 5, or SEQ ID NO: 623.

[0170] In some embodiments, a M-MLV RT of a prime editor comprises a Y133$, Y271$, L435$, and/or D524$ amino acid substitution as compared to a reference M-MLV RT as set forth in SEQ ID NO: 1, SEQ ID NO: 5, or SEQ ID NO: 623, wherein $ is any amino acid except for the original amino acid. In some embodiments, the M-MLV RT of the prime editor comprises a Y133R, Y271R, L435K, and/or D524N amino acid substitution as compared to a reference M-MLV RT as set forth in SEQ ID NO: 1, SEQ ID NO: 5, or SEQ ID NO: 623.

[0171] In some embodiments, a M-MLV RT of a prime editor comprises a Y133$ amino acid substitution as compared to a reference M-MLV RT as set forth in SEQ ID NO: 1, SEQ ID NO: 5, or SEQ ID NO: 623, wherein $ is any amino acid except for Y.

[0172] In some embodiments, the M-MLV RT of the prime editor comprises a Y133R amino acid substitution as compared to a reference M-MLV RT as set forth in SEQ ID NO: 1, SEQ ID NO: 5, or SEQ ID NO: 623.

[0173] In some embodiments, a M-MLV RT of a prime editor comprises a Y271$ amino acid substitution as compared to a reference M-MLV RT as set forth in SEQ ID NO: 1, SEQ ID NO: 5, or SEQ ID NO: 623, wherein $ is any amino acid except for Y.

[0174] In some embodiments, the M-MLV RT of the prime editor comprises a Y271R amino acid substitution as compared to a reference M-MLV RT as set forth in SEQ ID NO: 1, SEQ ID NO: 5, or SEQ ID NO: 623.

[0175] In some embodiments, a prime editor comprises a truncated M-MLVRT, wherein the M-MLVRT is truncated at C terminus between positions corresponding to amino acids 478 and 479, 478 and 479, 479 and 480, 480 and 481, 481 and 482, 482 and 483, 483 and 484, 484 and 485, 485 and 486, 486 and 487, 487 and 488, 488 and 489, 489 and 490, 490 and 491, 491 and 492, 492 and 493, 493 and 494, 494 and 495, 495 and 496, 496 and 497, 497 and 498, 498 and 499, 499 and 500, 500 and 501, 501 and 502, 502 and 503, 503 and 504, or 504 and 505 as set forth in SEQ ID NO: 1. In some embodiments, a prime editor comprises a truncated M-MLVRT, wherein the M-MLVRT is truncated after any amino acid that is C-terminal to amino acid 504 as set for the in SEQ ID NO: 1. In some embodiments, a prime editor comprises a truncated M-MLVRT, wherein the M-MLVRT is truncated after any amino acid that is C-terminal to amino acid 478 as set for the in SEQ ID NO: 1. In some embodiments, a prime editor comprises a truncated M-MLV RT, wherein amino acids at positions 505-679 of the M-MLV RT are truncated as compared to a reference M-MLV RT as set forth in SEQ ID NO: 1 SEQ ID NO: 5, or SEQ ID NO: 623. In some embodiments, a prime editor comprises a truncated M-MLV RT, wherein amino acids C terminal to position 504 of the M-MLV RT are truncated as compared to a reference M-MLV RT as set forth in SEQ ID NO: 1, SEQ ID NO: 5, or SEQ ID NO: 623 (G504 truncation). In some embodiments, the M-MLV RT (e.g., a truncated M-MLV RT) comprises a deletion of amino acids 505-679 relative to a reference M-MLV RT as set forth in SEQ ID NO: 1, SEQ ID NO: 5, or SEQ ID NO: 623. In some embodiments, the M-MLV RT (e.g., a truncated M-MLV RT) comprises a deletion of amino acids C-terminal to position 504 relative to a reference M-MLV RT as set forth in SEQ ID NO: 1, SEQ ID NO: 5, or SEQ ID NO: 623.

[0176] In some embodiments, a prime editor comprises a truncated M-MLV RT, wherein amino acids at positions C terminal to amino acid 365 of the M-MLV RT are deleted as compared to a reference M-MLV RT as set forth in SEQ ID NO: 1, SEQ ID NO: 5, or SEQ ID NO: 623. In some embodiments, a prime editor comprises a truncated M-MLV RT, wherein amino acids C terminal to position 365 of the M-MLV RT are truncated as compared to a reference M-MLV RT as set forth in SEQ ID NO: 1, SEQ ID NO: 5, or SEQ ID NO: 623 (P365 truncation). In some embodiments, the M-MLV RT (e.g., a truncated M-MLV RT) comprises a deletion of amino acids C terminal to amino acid 365 relative to a reference M-MLV RT as set forth in SEQ ID NO: 1, SEQ ID NO: 5, or SEQ ID NO: 623. In some embodiments, the M-MLV RT (e.g., a truncated M-MLV RT) comprises a deletion of amino acids C-terminal to position 365 relative to a reference M-MLV RT as set forth in SEQ ID NO: 1, SEQ ID NO: 5, or SEQ ID NO: 623. In some embodiments, a prime editor comprises a truncated M-MLV RT, wherein the M-MLV RT domain comprises an amino acid sequence that is truncated at C terminus between positions corresponding to amino acids 504 and 505 as set forth in SEQ ID NO: 1, 5, or 623. In some embodiments, a prime editor comprises a truncated M-MLV RT, wherein the M-MLV RT domain comprises an amino acid sequence that is truncated at C terminus between positions corresponding to amino acids 365 and 366 as set forth in SEQ ID NO: 1, 5, or 623. In some embodiments, a prime editor comprises a truncated M-MLV RT, wherein the M-MLV RT domain comprises an amino acid sequence that is truncated at C terminus between positions corresponding to amino acids 478 and 479 as set forth in SEQ ID NO: 1, 5, or 623. In some embodiments, a prime editor comprises a truncated M-MLV RT, wherein the M-MLV RT domain comprises an amino acid sequence that is truncated at C terminus after an amino acid between L478 and G504 compared to SEQ ID NO: 1, 5, or 623. In some embodiments, a prime editor comprises a truncated M-MLV RT, wherein the M-MLV RT domain comprises an amino acid sequence that is truncated at C terminus after amino acid L478 compared to SEQ ID NO: 1, 5, or 623. In some embodiments, a prime editor comprises a truncated M-MLV RT, wherein the M-MLV RT domain comprises an amino acid sequence that is truncated at C terminus between positions corresponding to amino acids 428 and 429 as set forth in SEQ ID NO: 1, 5, or 623. In some embodiments, a prime editor comprises a truncated M-MLV RT, wherein the M-MLV RT domain comprises an amino acid sequence that is truncated at C terminus between positions corresponding to amino acids 378 and 379 as set forth in SEQ ID NO: 1, 5, or 623. In some embodiments, a prime editor comprises a truncated M-MLV RT, wherein the M-MLV RT domain comprises an amino acid sequence that is truncated at C terminus between positions corresponding to amino acids 366 and 367 as set forth in SEQ ID NO: 1, 5, or 623. In some embodiments, a prime editor comprises a truncated M-MLV RT, wherein the M-MLV RT domain comprises an amino acid sequence that is truncated at C terminus between positions corresponding to amino acids 328 and 329 as set forth in SEQ ID NO: 1, 5, or 623. In some embodiments, a prime editor comprises a truncated M-MLV RT, wherein the M-MLV RT domain comprises an amino acid sequence that is truncated at C terminus between positions corresponding to amino acids 278 and 279 as set forth in SEQ ID NO: 1, 5, or 623.

[0177] In some embodiments, a prime editor comprises a truncated M-MLV RT, wherein amino acids at positions 479-679 of the M-MLV RT are truncated as compared to a reference M-MLV RT as set forth in SEQ ID NO: 1, SEQ ID NO: 5, or SEQ ID NO: 623. In some embodiments, the M-MLV RT of the prime editor comprises a truncated RNase H domain, wherein amino acids C terminal to position 478 are truncated as compared to a reference M-MLV RT as set forth in SEQ ID NO: 1, or SEQ ID NO: 623 (L478 truncation). In some embodiments, the M-MLV RT (e.g., a truncated M-MLV RT) comprises a deletion of amino acids 479-679 relative to a reference M-MLV RT as set forth in SEQ ID NO: 1, SEQ ID NO: 5, or SEQ ID NO: 623. In some embodiments, the M-MLV RT (e.g., a truncated M-MLV RT) comprises a deletion of amino acids C-terminal to position 478 relative to a reference M-MLV RT as set forth in SEQ ID NO: 1, SEQ ID NO: 5, or SEQ ID NO: 623.

[0178] In some embodiments, a prime editor comprises a truncated M-MLV RT, wherein amino acids at positions 429-679 of the M-MLV RT are truncated as compared to a reference M-MLV RT as set forth in SEQ ID NO: 1, SEQ ID NO: 5, or SEQ ID NO: 623. In some embodiments, a prime editor comprises a truncated M-MLV RT, wherein amino acids C terminal to position 428 are truncated as compared to a reference M-MLV RT as set forth in SEQ ID NO: 1, SEQ ID NO: 5, or SEQ ID NO: 623 (M428 truncation). In some embodiments, the M-MLV RT (e.g., a truncated M-MLV RT) comprises a deletion of amino acids 429-679 relative to a reference M-MLV RT as set forth in SEQ ID NO: 1, SEQ ID NO: 5, or SEQ ID NO: 623. In some embodiments, the M-MLV RT (e.g., a truncated M-MLV RT) comprises a deletion of amino acids C-terminal to position 428 relative to a reference M-MLV RT as set forth in SEQ ID NO: 1, SEQ ID NO: 5, or SEQ ID NO: 623.

[0179] In some embodiments a prime editor comprises a truncated M-MLV RT, wherein amino acids at positions 379-679 of the M-MLV RT are truncated as compared to a reference M-MLV RT as set forth in SEQ ID NO: 1, SEQ ID NO: 5, or SEQ ID NO: 623. In some embodiments, a prime editor comprises a truncated M-MLV RT, wherein amino acids C terminal to position 378 are truncated as compared to a reference M-MLV RT as set forth in SEQ ID NO: 1, SEQ ID NO: 5, or SEQ ID NO: 623 (K378 truncation). In some embodiments, the M-MLV RT (e.g., a truncated M-MLV RT) comprises a deletion of amino acids 379-679 relative to a reference M-MLV RT as set forth in SEQ ID NO: 1, SEQ ID NO: 5, or SEQ ID NO: 623. In some embodiments, the M-MLV RT (e.g., a truncated M-MLV RT) comprises a deletion of amino acids C-terminal to position 378 relative to a reference M-MLV RT as set forth in SEQ ID NO: 1, SEQ ID NO: 5, or SEQ ID NO: 623.

[0180] In some embodiments, a prime editor comprises a truncated M-MLV RT, wherein amino acids at positions 367-679 of the M-MLV RT are truncated as compared to a reference M-MLV RT as set forth in SEQ ID NO: 1, SEQ ID NO: 5, or SEQ ID NO: 623. In some embodiments, a prime editor comprises a truncated M-MLV RT, wherein amino acids C terminal to position 365 are truncated as compared to a reference M-MLV RT as set forth in SEQ ID NO: 1, SEQ ID NO: 5, or SEQ ID NO: 623 (P365 truncation). In some embodiments, the M-MLV RT (e.g., a truncated M-MLV RT) comprises a deletion of amino acids 367-679 relative to a reference M-MLV RT as set forth in SEQ ID NO: 1 SEQ ID NO: 5, or SEQ ID NO: 623. In some embodiments, the M-MLV RT (e.g., a truncated M-MLV RT) comprises a deletion of amino acids C-terminal to position 365 relative to a reference M-MLV RT as set forth in SEQ ID NO: 1, SEQ ID NO: 5, or SEQ ID NO: 623.

[0181] In some embodiments, a prime editor comprises a truncated M-MLV RT, wherein amino acids at positions 328-679 of the M-MLV RT are truncated as compared to a reference M-MLV RT as set forth in SEQ ID NO: 1, SEQ ID NO: 5, or SEQ ID NO: 623. In some embodiments, a prime editor comprises a truncated M-MLV RT, wherein amino acids C terminal to position 328 are truncated as compared to a reference M-MLV RT as set forth in SEQ ID NO: 1, SEQ ID NO: 5, or SEQ ID NO: 623 (T328 truncation). In some embodiments, the M-MLV RT (e.g., a truncated M-MLV RT) comprises a deletion of amino acids 328-679 relative to a reference M-MLV RT as set forth in SEQ ID NO: 1, SEQ ID NO: 5, or SEQ ID NO: 623. In some embodiments, the M-MLV RT (e.g., a truncated M-MLV RT) comprises a deletion of amino acids C-terminal to position 328 relative to a reference M-MLV RT as set forth in SEQ ID NO: 1, SEQ ID NO: 5, or SEQ ID NO: 623.

[0182] In some embodiments, a prime editor comprises a truncated M-MLV RT, wherein amino acids at positions 279-679 of the M-MLV RT are truncated as compared to a reference M-MLV RT as set forth in SEQ ID NO: 1, SEQ ID NO: 5, or SEQ ID NO: 623. In some embodiments, a prime editor comprises a truncated M-MLV RT, wherein amino acids C terminal to position 278 are truncated as compared to a reference M-MLV RT as set forth in SEQ ID NO: 1, SEQ ID NO: 5, or SEQ ID NO: 623 (R278 truncation). In some embodiments, the M-MLV RT (e.g., a truncated M-MLV RT) comprises a deletion of amino acids 279-679 relative to a reference M-MLV RT as set forth in SEQ ID NO: 1 SEQ ID NO: 5, or SEQ ID NO: 623. In some embodiments, the M-MLV RT (e.g., a truncated M-MLV RT) comprises a deletion of amino acids C-terminal to position 278 relative to a reference M-MLV RT as set forth in SEQ ID NO: 1, SEQ ID NO: 5, or SEQ ID NO: 623.

[0183] In some embodiments, a prime editor comprises a truncated M-MLV RT, wherein amino acids at positions 1-22 of the M-MLV RT are truncated as compared to a reference M-MLV RT as set forth in SEQ ID NO: 1, SEQ ID NO: 5, or SEQ ID NO: 623. In some embodiments, a prime editor comprises a truncated M-MLV RT, wherein amino acids N terminal to position 24 are truncated as compared to a reference M-MLV RT as set forth in SEQ ID NO: 1, SEQ ID NO: 5, or SEQ ID NO: 623. In some embodiments, the M-MLV RT (e.g., a truncated M-MLV RT) comprises a deletion of amino acids 1-22 relative to a reference M-MLV RT as set forth in SEQ ID NO: 1, SEQ ID NO: 5, or SEQ ID NO: 623. In some embodiments, the M-MLV RT (e.g., a truncated M-MLV RT) comprises a deletion of amino acids N-terminal to position 24 relative to a reference M-MLV RT as set forth in SEQ ID NO: 1, SEQ ID NO: 5, or SEQ ID NO: 623.

[0184] In some embodiments, a prime editor comprises an RT domain having one or more amino acid substitutions and/or one or more amino acid deletions compared a corresponding reference RT or a wild-type RT. In some embodiments, a prime editor comprises a M-MLV RT that has one or more amino acid substitutions and one or more amino acid deletions compared to a wild-type M-MLV RT or a reference RT (e.g., SEQ ID NO: 1, SEQ ID NO: 5, or SEQ ID NO: 623). In some embodiments, the M-MLV RT comprises an amino acid sequence that comprises one or more amino acid substitutions and/or one or more amino acid deletions compared to a reference M-MLV RT set forth in SEQ ID NO: 1, SEQ ID NO: 5, or SEQ ID NO: 623. Any one of the amino acid truncations, deletions, and substitutions described herein or known in the art can be combined in a prime editor RT, e.g., a M-MLV RT. In some embodiments, a prime editor comprises a M-MLV RT that comprises a Y133$, Y271$, L435$, and/or D524$ amino acid substitution, and wherein amino acids at positions 505-679 are truncated as compared to a reference M-MLV RT as set forth in SEQ ID NO: 1, SEQ ID NO: 5, or SEQ ID NO: 623, wherein $ is any amino acid except for the original amino acid. In some embodiments, a prime editor comprises a M-MLV RT that comprises a Y133R, Y271R, L435K, and/or D524N amino acid substitution, and wherein amino acids at positions 505-679 are truncated as compared to a reference M-MLV RT as set forth in SEQ ID NO: 1, SEQ ID NO: 5, or SEQ ID NO: 623.

[0185] In some embodiments, a prime editor comprises a M-MLV RT that comprises a Y133$, Y271$, L435$, and/or D524$ amino acid substitution, and wherein amino acids at positions 479-679 are truncated as compared to a reference M-MLV RT as set forth in SEQ ID NO: 1, SEQ ID NO: 5, or SEQ ID NO: 623, wherein $ is any amino acid except for the original amino acid. In some embodiments, a prime editor comprises a M-MLV RT that comprises a Y133R, Y271R, L435K, and/or D524N amino acid substitution, and wherein amino acids at positions 479-679 are truncated as compared to a reference M-MLV RT as set forth in SEQ ID NO: 1, SEQ ID NO: 5, or SEQ ID NO: 623.

[0186] In some embodiments, a prime editor comprises a M-MLV RT that comprises a Y133$, Y271$, L435$, and/or D524$ amino acid substitution, and wherein amino acids at positions 429-679 are truncated as compared to a reference M-MLV RT as set forth in SEQ ID NO: 1, SEQ ID NO: 5, or SEQ ID NO: 623 wherein $ is any amino acid except for the original amino acid. In some embodiments, a prime editor comprises a M-MLV RT that comprises a Y133R, Y271R, L435K, and/or D524N amino acid substitution, and wherein amino acids at positions 429-679 are truncated as compared to a reference M-MLV RT as set forth in SEQ ID NO: 1, SEQ ID NO: 5, or SEQ ID NO: 623.

[0187] In some embodiments, a prime editor comprises a M-MLV RT that comprises a Y133$, Y271$, L435$, and/or D524$ amino acid substitution, and wherein amino acids at positions 379-679 are truncated as compared to a reference M-MLV RT as set forth in SEQ ID NO: 1, SEQ ID NO: 5, or SEQ ID NO: 623, wherein $ is any amino acid except for the original amino acid. In some embodiments, a prime editor comprises a M-MLV RT that comprises a Y133R, Y271R, L435K, and/or D524N amino acid substitution, and wherein amino acids at positions 379-679 are truncated as compared to a reference M-MLV RT as set forth in SEQ ID NO: 1, SEQ ID NO: 5, or SEQ ID NO: 623.

[0188] In some embodiments, a prime editor comprises a M-MLV RT that comprises a Y133$, Y271$, L435$, and/or D524$ amino acid substitution, and wherein amino acids at positions 367-679 are truncated as compared to a reference M-MLV RT as set forth in SEQ ID NO: 1, SEQ ID NO: 5, or SEQ ID NO: 623, wherein $ is any amino acid except for the original amino acid. In some embodiments, a prime editor comprises a M-MLV RT that comprises a Y133R, Y271R, L435K, and/or D524N amino acid substitution, and wherein amino acids at positions 367-679 are truncated as compared to a reference M-MLV RT as set forth in SEQ ID NO: 1, SEQ ID NO: 5, or SEQ ID NO: 623.

[0189] In some embodiments, a prime editor comprises a M-MLV RT that comprises a Y133$, Y271$, L435$, and/or D524$ amino acid substitution, and wherein amino acids at positions 328-679 are truncated as compared to a reference M-MLV RT as set forth in SEQ ID NO: 1, SEQ ID NO: 5, or SEQ ID NO: 623, wherein $ is any amino acid except for the original amino acid. In some embodiments, a prime editor comprises a M-MLV RT that comprises a Y133R, Y271R, L435K, and/or D524N amino acid substitution, and wherein amino acids at positions 328-679 are truncated as compared to a reference M-MLV RT as set forth in SEQ ID NO: 1, SEQ ID NO: 5, or SEQ ID NO: 623.

[0190] In some embodiments, a prime editor comprises a M-MLV RT that comprises a Y133$, Y271$, L435$, and/or D524$ amino acid substitution, and wherein amino acids at positions 279-679 are truncated as compared to a reference M-MLV RT as set forth in SEQ ID NO: 1, SEQ ID NO: 5, or SEQ ID NO: 623, wherein $ is any amino acid except for the original amino acid. In some embodiments, a prime editor comprises a M-MLV RT that comprises a Y133R, Y271R, L435K, and/or D524N amino acid substitution, and wherein amino acids at positions 279-679 are truncated as compared to a reference M-MLV RT as set forth in SEQ ID NO: 1, SEQ ID NO: 5, or SEQ ID NO: 623.

[0191] In some embodiments, a prime editor comprises a M-MLV RT that comprises a Y133$, Y271$, L435$, and/or D524$ amino acid substitution, and wherein amino acids at positions 1-22 are truncated as compared to a reference M-MLV RT as set forth SEQ ID NO: 1, SEQ ID NO: 5, or SEQ ID NO: 623, wherein $ is any amino acid except for the original amino acid. In some embodiments, a prime editor comprises a M-MLV RT that comprises a Y133R, Y271R, L435K, and/or D524N amino acid substitution, and wherein amino acids at positions 1-22 are truncated as compared to a reference M-MLV RT as set forth in SEQ ID NO: 1, SEQ ID NO: 5, or SEQ ID NO: 623.

[0192] In some embodiments, a prime editor comprises a M-MLV RT that comprises a L435$ amino acid substitution, and wherein amino acids at positions 505-679 are truncated as compared to a reference M-MLV RT as set forth in SEQ ID NO: 1, SEQ ID NO: 5, or SEQ ID NO: 623, wherein $ is any amino acid except for L. In some embodiments, a prime editor comprises a M-MLV RT that comprises a L435K amino acid substitution, and wherein amino acids at positions 505-679 are truncated as compared to a reference M-MLV RT as set forth in SEQ ID NO: 1, SEQ ID NO: 5, or SEQ ID NO: 623.

[0193] In some embodiments, a prime editor comprises a M-MLV RT that comprises a L435$ amino acid substitution, and wherein amino acids at positions 1-22 are truncated as compared to a reference M-MLV RT as set forth in SEQ ID NO: 1, SEQ ID NO: 5, or SEQ ID NO: 623, wherein $ is any amino acid except for L. In some embodiments, a prime editor comprises a M-MLV RT that comprises a L435K amino acid substitution, and wherein amino acids at positions 1-22 are truncated as compared to a reference M-MLV RT as set forth in SEQ ID NO: 1, SEQ ID NO: 5, or SEQ ID NO: 623.

[0194] In some embodiments, a prime editor comprises a M-MLV RT, wherein the M-MLV RT comprises a L435$ amino acid substitution, and wherein amino acids at positions 1-22 and amino acids at positions 505-679 are truncated as compared to a reference M-MLV RT as set forth in SEQ ID NO: 1, SEQ ID NO: 5, or SEQ ID NO: 623, wherein $ is any amino acid except for L. In some embodiments, a prime editor comprises a M-MLV RT, wherein the M-MLV RT comprises a L435K amino acid substitution, and wherein amino acids at positions 1-22 and amino acids at positions 505-679 are truncated as compared to a reference M-MLV RT as set forth in SEQ ID NO: 1, SEQ ID NO: 5, or SEQ ID NO: 623.

[0195] In some embodiments, a prime editor comprises a M-MLV RT that comprises a Y133$ amino acid substitution, and wherein amino acids at positions 367-679 are truncated as compared to a reference M-MLV RT as set forth in SEQ ID NO: 1, SEQ ID NO: 5, or SEQ ID NO: 623, wherein $ is any amino acid except for Y. In some embodiments, a prime editor comprises a M-MLV RT that comprises a Y133R amino acid substitution, and wherein amino acids at positions 367-679 are truncated as compared to a reference M-MLV RT as set forth in SEQ ID NO: 1, SEQ ID NO: 5, or SEQ ID NO: 623.

[0196] In some embodiments, a prime editor comprises a M-MLV RT comprises a Y271$ amino acid substitution, and wherein amino acids at positions 367-679 are truncated as compared to a reference M-MLV RT as set forth in SEQ ID NO: 1, SEQ ID NO: 5, or SEQ ID NO: 623, wherein $ is any amino acid except for Y. In some embodiments, a prime editor comprises a M-MLV RT that comprises a Y271R amino acid substitution, and wherein amino acids at positions 367-679 are truncated as compared to a reference M-MLV RT as set forth in SEQ ID NO: 1, SEQ ID NO: 5, or SEQ ID NO: 623.

[0197] In some embodiments, a prime editor comprises a M-MLV RT that comprises a Y133$ and a Y271$ amino acid substitution, and wherein amino acids at positions 367-679 are truncated as compared to a reference M-MLV RT as set forth in SEQ ID NO: 1, SEQ ID NO: 5, or SEQ ID NO: 623, wherein $ is any amino acid except for Y. In some embodiments, a prime editor comprises a M-MLV RT that comprises a Y133R and a Y271R amino acid substitution, and wherein amino acids at positions 367-679 are truncated as compared to a reference M-MLV RT as set forth in SEQ ID NO: 1, SEQ ID NO: 5, or SEQ ID NO: 623.

[0198] In some embodiments, a prime editor comprises a M-MLV RT that comprises a Y133R, Y271R, L435K, and/or D524N amino acid substitution, and wherein amino acids at positions 1-22 are truncated as compared to a reference M-MLV RT as set forth in SEQ ID NO: 1, SEQ ID NO: 5, or SEQ ID NO: 623, wherein $ is any amino acid except for the original amino acid.

[0199] In some embodiments, a M-MLV RT comprises a deletion of amino acids C-terminal to position P365, a Y133$ amino acid substitution, and/or a Y271$ amino acid substitution as compared to a reference M-MLV RT as set forth in SEQ ID NO: 1, SEQ ID NO: 5, or SEQ ID NO: 623, wherein $ is any amino acid other than the original. In some embodiments, a M-MLV RT comprises a deletion of amino acids 366-679, a Y133$ amino acid substitution, and/or a Y271$ amino acid substitution as compared to a reference M-MLV RT as set forth in SEQ ID NO: 1, SEQ ID NO: 5, or SEQ ID NO: 623 wherein $ is any amino acid other than the original. In some embodiments, a M-MLV RT comprises a deletion of amino acids C-terminal to position P365, a Y133R amino acid substitution, and/or a Y271R amino acid substitution as compared to a reference M-MLV RT as set forth in SEQ ID NO: 1, SEQ ID NO: 5, or SEQ ID NO: 623 wherein $ is any amino acid other than the original. In some embodiments, a M-MLV RT comprises a deletion of amino acids C-terminal to position G504, and/or a L435$ amino acid substitution compared to a reference M-MLV RT as set forth in SEQ ID NO: 1, SEQ ID NO: 5, or SEQ ID NO: 623 wherein $ is any amino acid other than the original. In some embodiments, a M-MLV RT comprises a deletion of amino acids residues 505-679, and/or a L435$ amino acid substitution compared to a reference M-MLV RT as set forth in SEQ ID NO: 1, SEQ ID NO: 5, or SEQ ID NO: 623 wherein $ is any amino acid other than the original. In some embodiments, the M-MLV RT comprises a deletion of amino acids C-terminal to position G504, a deletion of amino acid residues 1-22, and/or a L435$ amino acid substitution compared to a reference M-MLV RT as set forth in SEQ ID NO: 1, SEQ ID NO: 5, or SEQ ID NO: 623 wherein $ is any amino acid other than the original. In some embodiments, a M-MLV RT comprises a deletion of amino acids residues 505-679, a deletion of N-terminus amino acid residues 1-22, and/or a L435$ amino acid substitution compared to a reference M-MLV RT as set forth in SEQ ID NO: 1, SEQ ID NO: 5, or SEQ ID NO: 623 wherein $ is any amino acid other than the original.

[0200] In some embodiments, a DNA polymerase domain, e.g., a reverse transcriptase domain, for example a M-MLV RT can comprise one or more mutations (e.g., one or more amino acid substitution, amino acid deletion, and/or amino acid insertion). Mutant reverse transcriptase can, for example, be obtained by mutating the gene or genes encoding the reverse transcriptase of interest by site-directed or random mutagenesis. In some embodiments, the mutation increases the efficiency of the DNA polymerase domain, e.g., a reverse transcriptase domain, e.g., by increasing editing efficiency, by increasing reverse transcriptase activity, and/or by increasing stability (e.g., thermostability). In some embodiments, a prime editor comprising the DNA polymerase domain comprising one or more mutations disclosed herein, can exhibit at least 10%, at least 20%, at least 30%, at least 40%, at least 50%, at least 60%, at least 70%, at least 80%, at least 90%, at least 100%, at least 150%, at least 200%, at least 300%, at least 400%, at least 500%, at least 600%, at least 700%, at least 800%, at least 900%, or at least 1000% increase in editing efficiency compared to a prime editor comprising a corresponding non-mutated DNA polymerase. In some embodiments, a DNA polymerase domain that is a M-MLV RT comprises one or more mutations selected from the group consisting of a P51$, a S67$, an E69$, an L139$, a T197$, a D200$, a H204$, a F209$, an E302$, a T306$, a F309$, a W313$, a T330$, an L435$, a P448$, a D449$, an N454$, a D524$, an E562$, a D583$, an H594$, an L603$, an E607$, a G615$, an H634$, a G637$, an H638$, a D653$, or an L671$ mutation relative to the reference M-MLV RT as set forth in SEQ ID NO: 1, SEQ ID NO: 5, or SEQ ID NO: 623, where $ is any amino acid other than the wild-type amino acid. In some embodiments, a DNA polymerase domain, for example, a M-MLV RT can comprise one or more amino acid substitution selected from the group consisting of a P51L, a S67K, an E69K, an L139P, a T197A, a D200N, a H204R, a F209N, an E302K, a T306K, a F309N, a W313F, a T330P, an L435G, a P448A, a D449G, an N454K, a D524G, an E562Q, a D583N, an H594Q, an L603W, an E607K, a G615, an H634Y, a G637R, an H638G, a D653N, or an L671P relative to the reference M-MLV RT as set forth in SEQ ID NO: 1, SEQ ID NO: 5, or SEQ ID NO: 623.

[0201] In some embodiments, the engineered RT may have improved stability, reverse transcription activity over a naturally occurring RT or RT domain. In some embodiments, the engineered RT may have improved features over a naturally occurring RT, for example, improved thermostability, reverse transcription efficiency, or target fidelity. In some embodiments, a prime editor comprising the engineered RT has improved prime editing efficiency over a prime editor having a reference naturally occurring RT.

[0202] A prime editor comprising any of the engineered RTs described herein can have altered functional features compared to a reference prime editor having the corresponding reference RT (e.g., a reference RT such as set forth in SEQ ID NO: 1). In some embodiments, a prime editor comprising an engineered RT described herein has improved stability compared to a reference prime editor having the corresponding reference RT (e.g., a reference RT such as set forth in SEQ ID NO: 1). In some embodiments, a prime editor comprising an engineered RT described herein has improved thermostability compared to a reference prime editor having the corresponding reference RT (e.g., a reference RT such as set forth in SEQ ID NO: 1). In some embodiments, a prime editor comprising an engineered RT described herein has improved solubility or reduced aggregation compared to a reference prime editor having the corresponding reference RT (e.g., a reference RT such as set forth in SEQ ID NO: 1). In some embodiments, the prime editor comprising the engineered RT has improved prime editing efficiency compared to a reference prime editor having the corresponding reference RT (e.g., a reference RT such as set forth in SEQ ID NO: 1). In some embodiments, the prime editor comprising the engineered RT has increased prime editing efficiency by at least 5%, at least 10%, at least 15%, at least 20%, at least 25%, at least 30%, at least 35%, at least 40%, at least 45%, at least 50%, at least 55%, at least 60%, at least 65%, at least 70%, at least 75%, at least 80%, at least 85%, at least 90%, at least 95%, at least 100%, at least 110%, at least 120%, at least 130%, at least 140%, at least 150%, at least 160%, at least 170%, at least 180%, at least 190%, at least 200%, at least 210%, at least 220%, at least 230%, at least 240%, at least 250%, at least 260%, at least 270%, at least 280%, at least 290%, at least 300% or more compared to the reference prime editor having the corresponding reference RT (e.g., or a reference RT as set forth in SEQ ID NO: 1). In some embodiments, the prime editor comprising the engineered RT has increased prime editing efficiency by at least 1.1 fold, 1.2 fold, 1.3 fold, 1.4 fold, 1.5 fold, 1.6 fold, 1.7 fold, 1.8 fold, 1.9 fold, 2 fold, 2.1 fold, 2.2 fold, 2.3 fold, 2.4 fold, 2.5 fold, 2.6 fold, 2.7 fold, 2.8 fold, 2.9 fold, 3 fold, 3.1 fold, 3.2 fold, 3.3 fold, 3.4 fold, 3.5 fold, 3.6 fold, 3.7 fold, 3.8 fold, 3.9 fold, 4 fold, 4.1 fold, 4.2 fold, 4.3 fold, 4.4 fold, 4.5 fold, 4.6 fold, 4.7 fold, 4.8 fold, 4.9 fold, 5 fold or more compared to the reference prime editor having the corresponding reference RT (e.g., a reference RT such as set forth in SEQ ID NO: 1).

### Programmable DNA Binding Domain

[0203] In some embodiments, a prime editor comprises a polypeptide domain having DNA binding activity (e.g., a DNA binding domain). In some embodiments, a prime editor comprises a polypeptide domain having DNA binding activity (e.g., a DNA binding domain). In some embodiments, a prime editor comprises a DNA binding domain. In some embodiments, the DNA binding domain comprises an amino acid sequence that is at least 85%, at least 86%, at least 87%, at least 88%, at least 89%, at least 90%, at least 91%, at least 92%, at least 93%, at least 94%, at least 95%, at least 96%, at least 97%, at least 98%, at least 99% identical, or 100% identical to any one of amino acid sequences set forth in SEQ ID NOs: 2, 6, 7, 596-613 (Table 14). In some embodiments, the DNA-binding domain comprises an amino acid sequence that has no more than 1, 2, 3, 4, 5, 6, 7, 8, 9, 10, 11, 12, 13, 14, 15, 16, 17, 18, 19, or 20 differences e.g., mutations e.g., deletions or substitutions compared to any one of the amino acid sequences set forth in SEQ ID NOs: 2, 6, 7, 596-613. In some embodiments, the DNA binding domain comprises an amino acid sequence that lacks a N-terminus methionine compared to a corresponding DNA binding domain (e.g., a DNA binding domain set forth in any one of SEQ ID NOs: 2, 6, 7, 596-613. (Table 14). In some embodiments, the amino acid sequence of a DNA binding domain can be N-terminally modified by one or more processing enzymes, e.g., by Methionine aminopeptidases (MAP).

[0204] In some embodiments, the DNA binding domain comprises a nuclease activity, for example, an RNA-guided DNA endonuclease activity of a Cas polypeptide. In some embodiments, the DNA binding domain comprises a nuclease domain or nuclease activity. In some embodiments, the DNA binding domain comprises a nickase, or a fully active nuclease. As used herein, the term “nickase” refers to a nuclease capable of cleaving only one strand of a double-stranded DNA target. In some embodiments, the DNA binding domain is an inactive nuclease.

[0205] In some embodiments, the DNA-binding domain of a prime editor is a programmable DNA binding domain. A programmable DNA binding domain refers to a protein domain that is designed to bind a specific nucleic acid sequence, e.g., a target DNA or a target RNA. In some embodiments, the DNA-binding domain is a polynucleotide programmable DNA-binding domain that can associate with a guide polynucleotide (e.g., a PEgRNA) that guides the DNA-binding domain to a specific DNA sequence, e.g., a search target sequence in a double stranded target DNA (e.g., the target gene). In some embodiments, the DNA-binding domain comprises a Clustered Regularly Interspaced Short Palindromic Repeats (CRISPR) Associated (Cas) protein. A Cas protein may comprise any Cas protein described herein or a functional fragment or functional variant thereof. In some embodiments, a DNA-binding domain may also comprise a zinc-finger protein domain. In other cases, a DNA-binding domain comprises a transcription activator-like effector domain (TALE). In some embodiments, the DNA-binding domain comprises a DNA nuclease. For example, the DNA-binding domain of a prime editor may comprise an RNA-guided DNA endonuclease, e.g., a Cas protein. In some embodiments, the DNA-binding domain comprises a zinc finger nuclease (ZFN) or a transcription activator like effector domain nuclease (TALEN), where one or more zinc finger motifs or TALE motifs are associated with one or more nucleases, e.g., a Fok I nuclease domain.

[0206] In some embodiments, the DNA-binding domain comprise a nuclease activity. In some embodiments, the DNA-binding domain of a prime editor comprises an endonuclease domain having single strand DNA cleavage activity. For example, the endonuclease domain may comprise a FokI nuclease domain. In some embodiments, the DNA-binding domain of a prime editor comprises a nuclease having full nuclease activity. In some embodiments, the DNA-binding domain of a prime editor comprises a nuclease having modified or reduced nuclease activity as compared to a wild-type endonuclease domain. For example, the endonuclease domain may comprise one or more amino acid substitutions as compared to a wild-type endonuclease domain. In some embodiments, the DNA-binding domain of a prime editor has nickase activity. In some embodiments, the DNA-binding domain of a prime editor comprises a Cas protein domain that is a nickase. In some embodiments, compared to a wild-type Cas protein, the Cas nickase comprises one or more amino acid substitutions in a nuclease domain that reduces or abolishes its double strand nuclease activity but retains DNA binding activity. In some embodiments, the Cas nickase comprises an amino acid substitution in a HNH domain. In some embodiments, the Cas nickase comprises an amino acid substitution in a RuvC domain.

[0207] In some embodiments, the DNA-binding domain comprises a CRISPR associated protein (Cas protein) domain. A Cas protein may be a Class 1 or a Class 2 Cas protein. A Cas protein can be a type I, type II, type III, type IV, type V Cas protein, or a type VI Cas protein. Non-limiting examples of Cas proteins include Cas9, Cas12a (Cpf1), Cas12e (CasX), Cas12d (CasY), Cas12b1 (C2c1), Cas12b2, Cas12c (C2c3), C2c4, C2c8, C2c5, C2c10, C2c9, Cas14a, Cas14b, Cas14c, Cas14d, Cas14e, Cas14f, Cas14g, Cas14h, Cas14u, Cns2, Cas Φ, and homologs, functional fragments, or modified versions thereof. A Cas protein can be a chimeric Cas protein that is fused to other proteins or polypeptides. A Cas protein can be a chimera of various Cas proteins, for example, comprising domains of Cas proteins from different organisms.

[0208] A Cas protein, e.g., Cas9, can be from any suitable organism. In some aspects, the organism is Streptococcus pyogenes (S. pyogenes). In some aspects, the organism is Staphylococcus aureus (S. aureus). In some aspects, the organism is Streptococcus thermophilus (S. thermophilus). In some embodiments, the organism is Staphylococcus lugdunensis.

[0209] A Cas protein, e.g., Cas9, can be a wild-type or a modified form of a Cas protein. A Cas protein, e.g., Cas9, can be a nuclease active variant, nuclease inactive variant, a nickase, or a functional variant or functional fragment of a wild-type Cas protein. In some embodiments, a Cas protein, e.g., Cas9, can comprise an amino acid change such as a deletion, insertion, substitution, fusion, chimera, or any combination thereof relative to a wild-type version of the Cas protein. In some embodiments, a Cas protein can be a polypeptide with at least about 50%, 60%, 70%, 80%, 90%, 91%, 92%, 93%, 94%, 95%, 96%, 97%, 98%, 99%, or 100% sequence identity or sequence similarity to a wild type exemplary Cas protein.

[0210] A Cas protein, e.g., Cas9, may comprise one or more domains. Non-limiting examples of Cas domains include, guide nucleic acid recognition and/or binding domain, nuclease domains (e.g., DNase or RNase domains, RuvC, HNH), DNA binding domain, RNA binding domain, helicase domains, protein-protein interaction domains, and dimerization domains. In various embodiments, a Cas protein comprises a guide nucleic acid recognition and/or binding domain can interact with a guide nucleic acid, and one or more nuclease domains that comprise catalytic activity for nucleic acid cleavage.

[0211] In some embodiments, a Cas protein, e.g., Cas9, comprises one or more nuclease domains. A Cas protein can comprise an amino acid sequence having at least about 50%, 60%, 70%, 80%, 90%, 91%, 92%, 93%, 94%, 95%, 96%, 97%, 98%, 99%, or 100% sequence identity to a nuclease domain (e.g., RuvC domain, HNH domain) of a wild-type Cas protein. In some embodiments, a Cas protein comprises a single nuclease domain. For example, a Cpf1 may comprise a RuvC domain but lacks HNH domain. In some embodiments, a Cas protein comprises two nuclease domains, e.g., a Cas9 protein can comprise an HNH nuclease domain and a RuvC nuclease domain.

[0212] In some embodiments, a prime editor comprises a Cas protein, e.g., Cas9, wherein all nuclease domains of the Cas protein are active. In some embodiments, a prime editor comprises a Cas protein having one or more inactive nuclease domains. One or a plurality of the nuclease domains (e.g., RuvC, HNH) of a Cas protein can be deleted or mutated so that they are no longer functional or comprise reduced nuclease activity. In some embodiments, a Cas protein, e.g., Cas9, comprising mutations in a nuclease domain has reduced (e.g. nickase) or abolished nuclease activity while maintaining its ability to target a nucleic acid locus at a search target sequence when complexed with a guide nucleic acid, e.g. a PEgRNA.

[0213] In some embodiments, a prime editor comprises a Cas nickase that can bind to the double stranded target DNA in a sequence-specific manner and generate a single-strand break at a protospacer within double-stranded DNA in the double stranded target DNA, but not a double-strand break. For example, the Cas nickase can cleave the edit strand or the non-edit strand of the double stranded target DNA but may not cleave both. In some embodiments, a prime editor comprises a Cas nickase comprising two nuclease domains (e.g., Cas9), with one of the two nuclease domains modified to lack catalytic activity or deleted. In some embodiments, the Cas nickase of a prime editor comprises a nuclease inactive RuvC domain and a nuclease active HNH domain. In some embodiments, the Cas nickase of a prime editor comprises a nuclease inactive HNH domain and a nuclease active RuvC domain. In some embodiments, a prime editor comprises a Cas9 nickase having an amino acid substitution in the RuvC domain. In some embodiments, the Cas9 nickase comprises a D10$ amino acid substitution compared to a wild-type S. pyogenes Cas9, wherein $ is any amino acid other than D. In some embodiments, a prime editor comprises a Cas9 nickase having an amino acid substitution in the HNH domain. In some embodiments, the Cas9 nickase comprises a H840$ amino acid substitution compared to a wild-type S. pyogenes Cas9, wherein $ is any amino acid other than H.

[0214] In some embodiments, a prime editor comprises a Cas protein that can bind to the double stranded target DNA in a sequence-specific manner but lacks or has abolished nuclease activity and may not cleave either strand of a double stranded DNA in a double stranded target DNA. Abolished activity or lacking activity can refer to an enzymatic activity less than 1%, less than 2%, less than 3%, less than 4%, less than 5%, less than 6%, less than 7%, less than 8%, less than 9%, or less than 10% activity compared to a wild-type exemplary activity (e.g., wild-type Cas9 nuclease activity). In some embodiments, a Cas protein of a prime editor completely lacks nuclease activity. A nuclease, e.g., Cas9, that lacks nuclease activity may be referred to as nuclease inactive or “nuclease dead” (abbreviated by “d”). A nuclease dead Cas protein (e.g., dCas, dCas9) can bind to a target polynucleotide but may not cleave the target polynucleotide. In some aspects, a dead Cas protein is a dead Cas9 protein. In some embodiments, a prime editor comprises a nuclease dead Cas protein wherein all of the nuclease domains (e.g., both RuvC and HNH nuclease domains in a Cas9 protein; RuvC nuclease domain in a Cpf1 protein) are mutated to lack catalytic activity or are deleted.

[0215] A Cas protein can be modified. A Cas protein, e.g., Cas9, can be modified to increase or decrease nucleic acid binding affinity, nucleic acid binding specificity, and/or enzymatic activity. Cas proteins can also be modified to change any other activity or property of the protein, such as stability. For example, one or more nuclease domains of the Cas protein can be modified, deleted, or inactivated, or a Cas protein can be truncated to remove domains that are not essential for the function of the protein or to optimize (e.g., enhance or reduce) the activity of the Cas protein.

[0216] A Cas protein can be a fusion protein. For example, a Cas protein can be fused to a cleavage domain, an epigenetic modification domain, a transcriptional regulation domain, or a polymerase domain. A Cas protein can also be fused to a heterologous polypeptide providing increased or decreased stability. The fused domain or heterologous polypeptide can be located at the N-terminus, the C-terminus, or internally within the Cas protein.

[0217] A Cas protein may be provided in any form. For example, a Cas protein may be provided in the form of a protein, such as a Cas protein alone or complexed with a guide nucleic acid. A Cas protein may be provided in the form of a nucleic acid encoding the Cas protein, such as an RNA (e.g., messenger RNA (mRNA)) or DNA. The nucleic acid encoding the Cas protein may be codon optimized for efficient translation into protein in a particular cell or organism.

[0218] Nucleic acids encoding Cas proteins may be stably integrated in the genome of the cell. Nucleic acids encoding Cas proteins may be operably linked to a promoter active in the cell. Nucleic acids encoding Cas proteins may be operably linked to a promoter in an expression construct. Expression constructs may include any nucleic acid constructs capable of directing expression of a gene or other nucleic acid sequence of interest (e.g., a Cas gene) and which may transfer such a nucleic acid sequence of interest to a target cell.

[0219] In some embodiments, a Cas protein may comprise a modified form of a wild type Cas protein. In some embodiments, the modified form of the wild type Cas protein may comprise one or more mutations (e.g., amino acid deletion, insertion, and/or substitution) that reduces the nucleic acid-cleaving activity of the Cas protein. For example, the modified form of the Cas protein may have less than 90%, less than 80%, less than 70%, less than 60%, less than 50%, less than 40%, less than 30%, less than 20%, less than 10%, less than 5%, or less than 1% of the nucleic acid-cleaving activity compared to the corresponding protein (e.g., Cas9 from S. pyogenes). In some embodiments, the modified form of Cas protein may have no substantial nucleic acid-cleaving activity. When a Cas protein is a modified form that has no substantial nucleic acid-cleaving activity, it may be referred to as enzymatically inactive and/or “dead” (abbreviated by “d”). A dead Cas protein (e.g., dCas, dCas9) may bind to a target polynucleotide but may not cleave the target polynucleotide. In some embodiments, a dead Cas protein is a dead Cas9 protein.

[0220] Enzymatically inactive can refer to a polypeptide that can bind to a nucleic acid sequence in a polynucleotide in a sequence-specific manner but may not cleave a target polynucleotide. An enzymatically inactive site-directed polypeptide may comprise an enzymatically inactive domain (e.g., nuclease domain). Enzymatically inactive can refer to no activity. Enzymatically inactive may refer to substantially no activity. Enzymatically inactive can refer to essentially no activity. Enzymatically inactive can refer to an activity less than 1%, less than 2%, less than 3%, less than 4%, less than 5%, less than 6%, less than 7%, less than 8%, less than 9%, or less than 10% activity compared to a corresponding wild-type exemplary activity (e.g., nucleic acid cleaving activity, wild-type Cas9 activity).

[0221] In some embodiments, one or a plurality of the nuclease domains (e.g., RuvC, HNH) of a Cas protein may be deleted or mutated so that they are no longer functional or comprise reduced nuclease activity. For example, in a Cas protein comprising at least two nuclease domains (e.g., Cas9), if one of the nuclease domains is deleted or mutated, the resulting Cas protein, known as a nickase, may generate a single-strand break at a CRISPR RNA (crRNA) recognition sequence within a double-stranded DNA but not a double-strand break. Such a nickase can cleave the complementary strand or the non-complementary strand but may not cleave both. If all of the nuclease domains of a Cas protein (e.g., both RuvC and HNH nuclease domains in a Cas9 protein; RuvC nuclease domain in a Cpf1 protein) are deleted or mutated, the resulting Cas protein may have a reduced or no ability to cleave both strands of a double-stranded target DNA. An example of a mutation that may convert a Cas9 protein into a nickase is a D10A amino acid substituion (aspartate to alanine at position 10 of Cas9 as set forth in SEQ ID NO: 2) mutation in the RuvC domain of Cas9 from S. pyogenes. A mutation corresponding to the H840A amino acid substitution (histidine to alanine at amino acid position 840 as set forth in SEQ ID NO: 2) in the HNH domain of Cas9 from S. pyogenes may convert the Cas9 into a nickase. An example of a mutation that may convert a Cas9 protein into a dead Cas9 is a D10A (aspartate to alanine at position 10 of Cas9) mutation in the RuvC domain and H840A (histidine to alanine at amino acid position 840) in the HNH domain of Cas9 from S. pyogenes.

[0222] In some embodiments, a dead Cas protein may comprise one or more mutations relative to a wild-type version of the protein. The mutation can result in less than 90%, less than 80%, less than 70%, less than 60%, less than 50%, less than 40%, less than 30%, less than 20%, less than 10%, less than 5%, or less than 1% of the nucleic acid-cleaving activity in one or more of the plurality of nucleic acid-cleaving domains of the wild-type Cas protein. The mutation may result in one or more of the plurality of nucleic acid-cleaving domains retaining the ability to cleave the complementary strand of the target nucleic acid but reducing its ability to cleave the non-complementary strand of the target nucleic acid. The mutation may result in one or more of the plurality of nucleic acid-cleaving domains retaining the ability to cleave the non-complementary strand of the target nucleic acid but reducing its ability to cleave the complementary strand of the target nucleic acid. The mutation may result in one or more of the plurality of nucleic acid-cleaving domains lacking the ability to cleave the complementary strand and the non-complementary strand of the target nucleic acid. The residues to be mutated in a nuclease domain may correspond to one or more catalytic residues of the nuclease. For example, residues in the wild type exemplary S. pyogenes Cas9 polypeptide such as Asp10, His840, Asn854 and Asn856 may be mutated to inactivate one or more of the plurality of nucleic acid-cleaving domains (e.g., nuclease domains). The residues to be mutated in a nuclease domain of a Cas protein may correspond to residues Asp10, His840, Asn854 and Asn856 in the wild type S. pyogenes Cas9 polypeptide, for example, as determined by sequence and/or structural alignment.

[0223] As non-limiting examples, one or more of amino acid residues D10, G12, G17, E762, H840, N854, N863, H982, H983, A984, D986, and/or A987 in a SpCas9 as set forth in SEQ ID NO: 2, or corresponding amino acid residues in another Cas9 protein may be mutated. For example, a Cas9 protein variant may comprise one or more of D10A, G12A, G17A, E762A, H840A, N854A, N863A, H982A, H983A, A984A, and/or D986A amino acid substitutions as set forth in SEQ ID NO: 2 or corresponding mutations. In some embodiments, mutations other than alanine substitutions can be suitable.

[0224] In some embodiments, the DNA-binding domain comprises a Cas protein domain that is a nickase. In some embodiments, the Cas nickase comprises one or more amino acid substitutions in a nuclease domain compared to a corresponding Cas protein. In some embodiments, the one or more amino acid substitutions in a nuclease domain reduces or abolishes its double strand nuclease activity but retains DNA binding activity. In some embodiments, the Cas nickase comprises an amino acid substitution in a HNH domain compared to a corresponding Cas protein. In some embodiments, the Cas nickase comprises an amino acid substitution in a RuvC domain compared to a corresponding Cas protein. In some embodiments, the Cas nickase is a Cas9 nickase. In some embodiments, the Cas9 nickase comprises one or more mutation in the HNH domain compared to a corresponding Cas9 protein. In some embodiments, one or more mutation in the HNH domain that reduces or abolishes nuclease activity of the HNH domain. Sequences of exemplary Cas9 nickase variants are provided in SEQ ID NOs: 7, 597, 598, 600, 601, 603, 606, 607, 609, 610, 612, or 613. In some embodiments, a Cas protein domain is a nuclease active variant, nuclease inactive variant, a nickase, or a functional variant or functional fragment of a wild type Cas protein.

[0225] In some embodiments, the Cas protein domain can be between 800 and 1500 amino acids in length, between 1400 and 900 amino acids in length, or at least 1000 and 1300 amino acids in length. In some embodiments, the Cas9 protein domain may be at least 800 amino acids in length, at least 900 amino acids in length, at least 1000 amino acids in length, at least 1100 amino acids in length, or at least 1200 amino acids in length. In some embodiments, the Cas9 protein domain is 1057 amino acids in length. In some embodiments, the Cas protein domain is 1069 amino acids in length. In some embodiments, the Cas protein domain is 1369 amino acids in length.

[0226] In some embodiments, the Cas protein domain recognizes the PAM sequence “NGA,” wherein N is any nucleotide. In some embodiments, the Cas protein domain recognizes the PAM sequence “NGN,” wherein N is any nucleotide. In some embodiments, the Cas protein domain recognizes the PAM sequence “NRN,” wherein N is any nucleotide. In some embodiments, the Cas protein domain recognizes the PAM sequence “NNGRRT,” wherein N is any nucleotide. In some embodiments, the Cas protein domain recognizes the PAM sequence “NNGG,” wherein N is any nucleotide.

[0227] In some embodiments, a prime editor provided herein comprises a Cas protein domain that contains modifications that allow altered PAM recognition. In prime editing using a Cas-protein-based prime editor, a “protospacer adjacent motif (PAM)”, PAM sequence, or PAM-like motif, may be used to refer to a short DNA sequence immediately adjacent to the protospacer sequence on the PAM strand of the target gene. In some embodiments, the PAM is recognized by the Cas nuclease in the prime editor during prime editing. In certain embodiments, the PAM is required for target binding of the Cas protein domain. The specific PAM sequence required for Cas protein domain recognition may depend on the specific type of the Cas protein. A PAM can be 1, 2, 3, 4, 5, 6, 7, 8, 9, 10 or more nucleotides in length. In some embodiments, a PAM is between 2-6 nucleotides in length. In some embodiments, the PAM can be a 5′ PAM (i.e., located upstream of the 5′ end of the protospacer). In other embodiments, the PAM can be a 3′ PAM (i.e., located downstream of the 5′ end of the protospacer). In some embodiments, the Cas protein of a prime editor recognizes a canonical PAM, for example, a SpCas9 recognizes 5′-NGG-3′ PAM.

[0228] In some embodiments, a Cas protein domain comprises one or more nuclease domains. In some embodiments, a Cas protein domain may comprise an amino acid sequence having at least about 50%, 60%, 70%, 80%, 90%, 91%, 92%, 93%, 94%, 95%, 96%, 97%, 98%, 99%, or 100% sequence identity to a nuclease domain of a wild-type Cas protein. In some embodiments, a Cas protein domain may comprise an amino acid sequence having at least about 50%, 60%, 70%, 80%, 90%, 91%, 92%, 93%, 94%, 95%, 96%, 97%, 98%, 99%, or 100% sequence identity to a nuclease domain of a reference Cas protein (e.g., a Cas protein selected from any one of SEQ ID NOs: 2, 6, 7, 596-613. In some embodiments, a Cas protein domain comprises a single nuclease domain.

[0229] In some embodiments, a prime editor comprises a Cas protein domain that can bind to the target gene in a sequence-specific manner but lacks or has abolished nuclease activity and may not cleave either strand of a double stranded DNA in a target gene. Abolished activity or lacking activity can refer to an enzymatic activity less than 1%, less than 2%, less than 3%, less than 4%, less than 5%, less than 6%, less than 7%, less than 8%, less than 9%, or less than 10% activity compared to a wild-type exemplary activity (e.g., wild-type Cas9 nuclease activity).

[0230] Exemplary Cas protein domains are shown in Table 14. In some embodiments, a DNA binding domain (e.g., the Cas protein domain or a Cas protein) is at least about 85%, 86%, 87%, 88%, 89%, 90%, 91%, 92%, 93%, 94%, 95%, 96%, 97%, 98%, or 99% identical to an amino acid sequence selected from the group consisting of SEQ ID NOs: 2, 6, 7, 596-613. In some embodiments, a DNA binding domain (e.g., a Cas protein domain or a Cas protein) comprises an amino acid sequence selected from the group consisting of SEQ ID NOs: 2, 6, 7, 596-613 (e.g., Table 14). In some embodiments, a Cas protein or a Cas protein domain comprises an amino acid sequence that is at least about 85%, 86%, 87%, 88%, 89%, 90%, 91%, 92%, 93%, 94%, 95%, 96%, 97%, 98%, or 99% identical to an amino acid sequence selected from the group consisting of SEQ ID NOs: 2, 6, 7, 596-613 (e.g., Table 14). In some embodiments, a Cas protein or a Cas protein domain comprises an amino acid sequence selected from the group consisting of SEQ ID NOs: 2, 6, 7, 596-613 (e.g., Table 14). In some embodiments, a Cas protein or a Cas protein domain comprises an amino acid sequence that lacks a N-terminus methionine compared to a corresponding Cas protein or Cas protein domain (e.g., any one of Cas protein or Cas protein domain set forth in SEQ ID NO: 2, 6, 7, 596-613). In some embodiments, a prime editing composition comprises a polynucleotide that encodes a DNA binding domain (e.g., a Cas protein or a Cas protein domain) that comprises an amino acid sequence that is at least about 85%, 86%, 87%, 88%, 89%, 90%, 91%, 92%, 93%, 94%, 95%, 96%, 97%, 98%, 99% or 100% identical to an amino acid sequence of any one of SEQ ID NOs: 2, 6, 7, 596-613. In some embodiments, a prime editing composition comprises a polynucleotide that encodes a DNA binding domain (e.g., a Cas protein or a Cas protein domain) that comprises an amino acid sequence selected from the group consisting of SEQ ID NOs: 2, 6, 7, 596-613. In some embodiments, a polynucleotide that encodes a DNA binding domain (e.g., a Cas protein or a Cas protein domain) is a DNA polynucleotide. In some embodiments, a polynucleotide that encodes a DNA binding domain (e.g., a Cas protein or a Cas protein domain) is a RNA polynucleotide. In some embodiments, a polynucleotide (e.g., a DNA polynucleotide) that encodes a DNA binding domain e.g., a Cas protein or a Cas protein domain comprises a nucleic acid sequence that is at least about 85%, 86%, 87%, 88%, 89%, 90%, 91%, 92%, 93%, 94%, 95%, 96%, 97%, 98%, or 99% identical to the nucleic acid sequence of SEQ ID NO: 627, or SEQ ID NO: 629. In some embodiments, a polynucleotide (e.g., a DNA polynucleotide) that encodes a DNA binding domain e.g., a Cas protein or a Cas protein domain, comprises a nucleic acid sequence that is selected from the group consisting of SEQ ID NO: 627, and SEQ ID NO: 629.

[0231] In some embodiments, a polynucleotide (e.g., an RNA polynucleotide) that encodes a DNA binding domain e.g., a Cas protein or a Cas protein domain, comprises a nucleic acid sequence that is at least about 85%, 86%, 87%, 88%, 89%, 90%, 91%, 92%, 93%, 94%, 95%, 96%, 97%, 98%, or 99% identical to the nucleic acid sequence of SEQ ID NO: 628, or SEQ ID NO: 630. In some embodiments, a polynucleotide (e.g., a RNA polynucleotide) that encodes a DNA binding domain e.g., a Cas protein or a Cas protein domain, comprises a nucleic acid sequence that is selected from the group consisting of SEQ ID NO: 628, or SEQ ID NO: 630.

[0232] In some embodiments, the Cas protein of a prime editor is a Class 2 Cas protein. In some embodiments, the Cas protein is a type II Cas protein. In some embodiments, the Cas protein is a Cas9 protein, a modified version of a Cas9 protein, a Cas9 protein homolog, mutant, variant, or a functional fragment thereof. As used herein, a Cas9, Cas9 protein, Cas9 polypeptide or a Cas9 nuclease refers to an RNA guided nuclease comprising one or more Cas9 nuclease domains and a Cas9 gRNA binding domain having the ability to bind a guide polynucleotide, e.g., a PEgRNA. A Cas9 protein may refer to a wild-type Cas9 protein from any organism or a homolog, ortholog, or paralog from any organisms; any functional mutants or functional variants thereof; or any functional fragments or domains thereof. In some embodiments, a prime editor comprises a full-length Cas9 protein. In some embodiments, the Cas9 protein can generally comprises at least about 50%, 60%, 70%, 80%, 90%, 100% sequence identity to a wild-type reference Cas9 protein (e.g., Cas9 from S. pyogenes). In some embodiments, the Cas9 comprises an amino acid change such as a deletion, insertion, substitution, fusion, chimera, or any combination thereof as compared to a wild-type reference Cas9 protein. Exemplary Cas9 sequences are provided in Table 14.

[0233] In some embodiments, a Cas9 protein may comprise a Cas9 protein from Streptococcus pyogenes (Sp), Staphylococcus aureus (Sa), Streptococcus canis (Sc), Streptococcus thermophilus (St), Staphylococcus lugdunensis (Slu), Neisseria meningitidis (Nm), Campylobacter jejuni (Cj), Francisella novicida (Fn), or Treponema denticola (Td), or any Cas9 homolog or ortholog from an organism known in the art. In some embodiments, a Cas9 polypeptide is a SpCas9 polypeptide, e.g., comprising an amino acid sequence as set forth in NCBI Accession No. WP_038431314 or a fragment or variant thereof. In some embodiments, a Cas9 polypeptide is a SaCas9 polypeptide, e.g., comprising an amino acid sequence as set forth in Uniprot Accession No. J7RUA5 or a fragment or variant thereof. In some embodiments, a Cas9 polypeptide is a ScCas9 polypeptide, e.g., comprising an amino acid sequence as set forth in Uniprot Accession No. A0A3P5YA78 or a fragment or variant thereof. In some embodiments, a Cas9 polypeptide is a StCas9 polypeptide, e.g., comprising an amino acid sequence as set forth in NCBI Accession No. WP_007896501.1 or a fragment or variant thereof. In some embodiments, a Cas9 polypeptide is a SluCas9 polypeptide, e.g., comprising an amino acid sequence as set forth in any of NCBI Accession No. WP_230580236.1 or WP_250638315.1 or WP_242234150.1, WP_241435384.1, WP_002460848.1, KAK58371.1, or a fragment or variant thereof. In some embodiments, a Cas9 polypeptide is a NmCas9 polypeptide, e.g., comprising an amino acid sequence as set forth in any of NCBI Accession No. WP_002238326.1 or WP_061704949.1 or a fragment or variant thereof. In some embodiments, a Cas9 polypeptide is a CjCas9 polypeptide, e.g., comprising an amino acid sequence as set forth in any of NCBI Accession No. WP_100612036.1, WP 116882154.1, WP 116560509.1, WP_116484194.1, WP_116479303.1, WP_115794652.1, WP_100624872.1, or a fragment or variant thereof. In some embodiments, a Cas9 polypeptide is a FnCas9 polypeptide, e.g., comprising the amino acid sequence as set forth in Uniprot Accession No. A0Q5Y3 or a fragment or variant thereof. In some embodiments, a Cas9 polypeptide is a TdCas9 polypeptide, e.g., comprising the amino acid sequence as set forth in NCBI Accession No. WP_147625065.1 or a fragment or variant thereof. In some embodiments, a Cas9 polypeptide is a chimera comprising domains from two or more of the organisms described herein or those known in the art. In some embodiments, a Cas9 polypeptide is a Cas9 polypeptide from Streptococcus macacae, e.g., comprising the amino acid sequence as set forth in NCBI Accession No. WP_003079701.1 or a fragment or variant thereof. In some embodiments, a Cas9 polypeptide is a Cas9 polypeptide generated by replacing a PAM interaction domain of a SpCas9 with that of a Streptococcus macacae Cas9 (Spy-mac Cas9).

[0234] An exemplary Streptococcus pyogenes Cas9 (SpCas9) amino acid sequence is provided in SEQ ID NO: 2.

[0235] In some embodiments, a prime editor comprises a Cas9 protein from Staphylococcus lugdunensis (Slu Cas9). An exemplary amino acid sequence of a Slu Cas9 is provided in SEQ ID NO: 606.

[0236] In some embodiments, a Cas9 protein comprises a variant Cas9 protein containing one or more amino acid substitutions. In some embodiments, a wildtype Cas9 protein comprises a RuvC domain and an HNH domain. In some embodiments, a prime editor comprises a nuclease active Cas9 protein that may cleave both strands of a double stranded target DNA sequence. In some embodiments, the nuclease active Cas9 protein comprises a functional RuvC domain and a functional HNH domain. In some embodiments, a prime editor comprises a Cas9 nickase that can bind to a guide polynucleotide and recognize a target DNA but can cleave only one strand of a double stranded target DNA. In some embodiments, the Cas9 nickase comprises only one functional RuvC domain or one functional HNH domain. In some embodiments, a prime editor comprises a Cas9 that has a non-functional HNH domain and a functional RuvC domain. In some embodiments, the prime editor can cleave the edit strand (i.e., the PAM strand), but not the non-edit strand of a double stranded target DNA sequence. In some embodiments, a prime editor comprises a Cas9 having a non-functional RuvC domain that can cleave the target strand (i.e., the non-PAM strand), but not the edit strand of a double stranded target DNA sequence. In some embodiments, a prime editor comprises a Cas9 that has neither a functional RuvC domain nor a functional HNH domain, which may not cleave any strand of a double stranded target DNA sequence.

[0237] In some embodiments, a prime editor comprises a Cas9 having a mutation in the RuvC domain that reduces or abolishes the nuclease activity of the RuvC domain. In some embodiments, the Cas9 comprises a mutation at amino acid D10 as compared to a wild type SpCas9 as set forth in SEQ ID NO: 2, or a corresponding mutation thereof. In some embodiments, the Cas9 comprises a D10A mutation as compared to a wild type SpCas9 as set forth in SEQ ID NO: 2, or a corresponding mutation thereof. In some embodiments, the Cas9 polypeptide comprises a mutation at amino acid D10, G12, and/or G17 as compared to a wild-type SpCas9 as set forth in SEQ ID NO: 2, or a corresponding mutation thereof. In some embodiments, the Cas9 polypeptide comprises a D10A mutation, a G12A mutation, and/or a G17A mutation as compared to a wild-type SpCas9 as set forth in SEQ ID NO: 2, or a corresponding mutation thereof.

[0238] In some embodiments, a prime editor comprises a Cas9 polypeptide having a mutation in the HNH domain that reduces or abolishes the nuclease activity of the HNH domain. In some embodiments, the Cas9 polypeptide comprises a mutation at amino acid H840 as compared to a wild-type SpCas9 as set forth in SEQ ID NO: 2, or a corresponding mutation thereof. In some embodiments, the Cas9 polypeptide comprises a H840A mutation as compared to a wild-type SpCas9 as set forth in SEQ ID NO: 2, or a corresponding mutation thereof. In some embodiments, the Cas9 polypeptide comprises a mutation at amino acid E762, D839, H840, N854, N856, N863, H982, H983, A984, D986, and/or a A987 as compared to a wild-type SpCas9 as set forth in SEQ ID NO: 2, or a corresponding mutation thereof. In some embodiments, the Cas9 polypeptide comprises a E762A, D839A, H840A, N854A, N856A, N863A, H982A, H983A, A984A, and/or a D986A mutation as compared to a wild-type SpCas9 as set forth in SEQ ID NO: 2, or a corresponding mutation thereof.

[0239] In some embodiments, a prime editor comprises a Cas9 having one or more amino acid substitutions in both the HNH domain and the RuvC domain that reduce or abolish the nuclease activity of both the HNH domain and the RuvC domain. In some embodiments, the prime editor comprises a nuclease inactive Cas9, or a nuclease dead Cas9 (dCas9). In some embodiments, the dCas9 comprises a H840$ substitution and a D10X mutation compared to a wild-type SpCas9 as set forth in SEQ ID NO: 2 or corresponding mutations thereof, wherein $ is any amino acid other than H for the H840$ substitution and any amino acid other than D for the D10$ substitution. In some embodiments, the dead Cas9 comprises a H840A and a D10A mutation as compared to a wild-type SpCas9 as set forth in SEQ ID NO: 2, or corresponding mutations thereof.

[0240] In some embodiments, the N-terminal methionine is removed from a Cas9 nickase, or from any Cas9 variant, ortholog, or equivalent disclosed or contemplated herein. For example, methionine-minus Cas9 nickases include the following sequences SEQ ID NO. 7, 598, 601, 604, 607, 610, 613, or a variant thereof having an amino acid sequence that has at least 80%, at least 85%, at least 90%, at least 95%, or at least 99% sequence identity thereto.

[0241] Besides dead Cas9 and Cas9 nickase variants, the Cas9 proteins used herein may also include other Cas9 variants having at least about 70% identical, at least about 80% identical, at least about 90% identical, at least about 95% identical, at least about 96% identical, at least about 97% identical, at least about 98% identical, at least about 99% identical, at least about 99.5% identical, or at least about 99.9% identical to any reference Cas9 protein, including any wild type Cas9, or mutant Cas9 (e.g., a dead Cas9 or Cas9 nickase), or fragment Cas9, or circular permutant Cas9, or other variant of Cas9 disclosed herein or known in the art. In some embodiments, a Cas9 variant may have 1, 2, 3, 4, 5, 6, 7, 8, 9, 10, 11, 12, 13, 14, 15, 16, 17, 18, 19, 20, 21, 22, 21, 24, 25, 26, 27, 28, 29, 30, 31, 32, 33, 34, 35, 36, 37, 38, 39, 40, 41, 42, 43, 44, 45, 46, 47, 48, 49, 50 or more amino acid changes compared to a reference Cas9, e.g., a wild type Cas9. In some embodiments, the Cas9 variant comprises a fragment of a reference Cas9 (e.g., a gRNA binding domain or a DNA-cleavage domain), such that the fragment is at least about 70% identical, at least about 80% identical, at least about 90% identical, at least about 95% identical, at least about 96% identical, at least about 97% identical, at least about 98% identical, at least about 99% identical, at least about 99.5% identical, or at least about 99.9% identical to the corresponding fragment of the reference Cas9, e.g., a wild type Cas9. In some embodiments, the fragment is at least 30%, at least 35%, at least 40%, at least 45%, at least 50%, at least 55%, at least 60%, at least 65%, at least 70%, at least 75%, at least 80%, at least 85%, at least 90%, at least 95% identical, at least 96%, at least 97%, at least 98%, at least 99%, or at least 99.5% of the amino acid length of a corresponding wild type Cas9. In some embodiments, a reference Cas9 comprises an amino acid sequence selected from the group consisting of SEQ ID NOs: 2, 6, 7, 596-613. In some embodiments, a prime editor comprises a Cas protein, e.g., Cas9, containing modifications that allow altered PAM recognition. In prime editing using a Cas-protein-based prime editor, a “protospacer adjacent motif (PAM)”, PAM sequence, or PAM-like motif, may be used to refer to a short DNA sequence immediately following the protospacer sequence on the PAM strand of the double stranded target DNA (e.g., target gene). In some embodiments, the PAM is recognized by the Cas nuclease in the prime editor during prime editing. In certain embodiments, the PAM is required for target binding of the Cas protein. The specific PAM sequence required for Cas protein recognition may depend on the specific type of the Cas protein. A PAM can be 1, 2, 3, 4, 5, 6, 7, 8, 9, 10 or more nucleotides in length. In some embodiments, a PAM is between 2-6 nucleotides in length. In some embodiments, the PAM can be a 5′ PAM (i.e., located upstream of the 5′ end of the protospacer). In other embodiments, the PAM can be a 3′ PAM (i.e., located downstream of the 5′ end of the protospacer). In some embodiments, the Cas protein of a prime editor recognizes a canonical PAM, for example, a SpCas9 recognizes 5′-NGG-3′ PAM. In some embodiments, the Cas protein of a prime editor has altered or non-canonical PAM specificities. Exemplary PAM sequences and corresponding Cas variants are described in Table 1a below. It should be appreciated that for each of the variants provided, the Cas protein comprises one or more of the amino acid substitutions as indicated compared to a wild-type Cas protein sequence, for example, the Cas9 as set forth in SEQ ID NO: 2. The PAM motifs as shown in Table 1a below are in the order of 5′ to 3′.

TABLE 1a
Cas protein variants and corresponding PAM sequences.
W: A or T; V: A or C or G; R: A or G

| Variant | PAM |
|---|---|
| spCas9 (wild type) | NGG, NGA, NAG, |
| | NGNGA |
| spCas9-VRVRFRR R1335V/L1111R/D1135V/G1218R/E1219F/A1322R/T1337R | NG |
| spCas9-VQR (D1135V/R1335Q/T1337R ) | NGA |
| spCas9-EQR (D1135E/R1335Q/T1337R) | NGA |
| spCas9-VRER (D1135V/G1218R/R1335E/T1337R) | NGCG |
| spCas9-VRQR (D1135V, G1218R, R1335Q, T1337R) | NGA |
| Cas9-NG (L1111R, D1135V, G1218R, E1219F, A1322R, T1337R, R1335V) | NGN |
| SpG Cas9 (D1135L, S1136W, G1218K, E1219Q, R1335Q, T1337R) | NGN |
| SyRY Cas9 | NRN |
| (A61R, L1111R, N1317R, A1322R, and R1333P) | |
| xCas9 (E480K, E543D, E1219V, K294R, Q1256K, A262T, S409I, M694I) | NGN |
| SluCa9 | NNGG |
| saCas9 | NNGRRT (SEQ ID |
| | NO: 614), NNGRRN |
| | (SEQ ID NO: 615) |
| saCas9-KKH (E782K, N968K, R1015H) | NNNRRT (SEQ ID |
| | NO: 616) |
| spCas9-MQKSER (D1135M, S1136Q, G1218K, E1219S, R1335E, T1337R) | NGCG/NGCN |
| spCas9-LRKIQK (D1135L, S1136R, G1218K, E1219I, R1335Q, T1337K) | NGTN |
| spCas9-LRVSQK (D1135L, S1136R, G1218V, E1219S, R1335Q, T1337K) | NGTN |
| spCas9-LRVSQL(D1135L, S1136R, G1218V, E1219S, R1335Q, T1337L) | NGTN |
| Cpf1 | TTTV |
| Spy-Mac | NAA |
| NmCas9 | NNNNGATT (SEQ |
| | ID NO: 617) |
| StCas9 | NNAGAAW (SEQ ID |
| | NO: 618) |
| TdCas9 | NAAAAC (SEQ ID |
| | NO: 619) |

[0242] In some embodiments, a prime editor comprises a Cas9 polypeptide comprising one or mutations selected from the group consisting of: A61R, L111R, D1135V, R221K, A262T, R324L, N394K, S409I, S409I, E427G, E480K, M495V, N497A, Y515N, K526E, F539S, E543D), R654L, R661A, R661L, R691A, N692A, M694A, M694I, Q695A, H698A, R753G, M763I, K848A, K890N, Q926A, K1003A, R1060A, L1111R, R1114G, D1135E, D1135L, D1135N, S1136W, V1139A, D1180G, G1218K, G1218R, G1218S, E1219Q, E1219V, E1219V, Q1221H, P1249S, E1253K, N1317R, A1320V, P1321S, A1322R, I1322V, D1332G, R1332N, A1332R, R1333K, R1333P, R1335L, R1335Q, R1335V, T1337N, T1337R, S1338T, H1349R, and any combinations thereof as compared to a wildtype SpCas9 polypeptide as set forth in SEQ ID NO: 2.

[0243] In some embodiments, a prime editor comprises a SaCas9 polypeptide. In some embodiments, the SaCas9 polypeptide comprises one or more of mutations E782K, N968K, and R1015H as compared to a wild-type SaCas9 (e.g., SEQ ID NO: 596). In some embodiments, a prime editor comprises a FnCas9 polypeptide, for example, a wild-type FnCas9 polypeptide or a FnCas9 polypeptide comprising one or more of mutations E1369R, E1449H, or R1556A as compared to the wild-type FnCas9. In some embodiments, a prime editor comprises a ScCas9, for example, a wild-type ScCas9 or a ScCas9 polypeptide comprises one or more of mutations I367K, G368D, I369K, H371L, T375S, T376G, and T1227K as compared to the wild-type ScCas9. In some embodiments, a prime editor comprises a St1 Cas9 polypeptide, a St3 Cas9 polypeptide, or a Slu Cas9 polypeptide.

[0244] In some embodiments, a prime editor comprises a Cas polypeptide that comprises a circular permutant Cas variant. For example, a Cas9 polypeptide of a prime editor may be engineered such that the N-terminus and the C-terminus of a Cas9 protein (e.g., a wild-type Cas9 protein, or a Cas9 nickase) are topically rearranged to retain the ability to bind DNA when complexed with a guide RNA (gRNA). An exemplary circular permutant configuration may be N-terminus-[original C-terminus]-[original N-terminus]-C-terminus. Any of the Cas9 proteins described herein, including any variant, ortholog, or naturally occurring Cas9 or equivalent thereof, may be reconfigured as a circular permutant variant.

[0245] In some embodiments, prime editors described herein may also comprise Cas proteins other than Cas9. For example, in some embodiments, a prime editor as described herein may comprise a Cas12a (Cpf1) polypeptide or functional variants thereof. In some embodiments, the Cas12a polypeptide comprises a mutation that reduces or abolishes the endonuclease domain of the Cas12a polypeptide. In some embodiments, the Cas12a polypeptide is a Cas12a nickase. In some embodiments, the Cas protein comprises an amino acid sequence that comprises at least about 50%, 60%, 70%, 80%, 90%, 91%, 92%, 93%, 94%, 95%, 96%, 97%, 98%, 99%, or 100% sequence identity to a naturally occurring Cas12a polypeptide.

[0246] In some embodiments, a prime editor comprises a Cas protein that is a Cas12b (C2c1) or a Cas12c (C2c3) polypeptide. In some embodiments, the Cas protein comprises an amino acid sequence that comprises at least about 50%, 60%, 70%, 80%, 90%, 91%, 92%, 93%, 94%, 95%, 96%, 97%, 98%, 99%, or 100% sequence identity to a naturally occurring Cas12b (C2c1) or Cas12c (C2c3) protein. In some embodiments, the Cas protein is a Cas12b nickase or a Cas12c nickase. In some embodiments, the Cas protein is a Cas12e, a Cas12d, a Cas13, Cas14a, Cas14b, Cas14c, Cas14d, Cas14e, Cas14f, Cas14g, Cas14h, Cas14u, or a Cas Φ polypeptide. In some embodiments, the Cas protein comprises an amino acid sequence that comprises at least about 50%, 60%, 70%, 80%, 90%, 91%, 92%, 93%, 94%, 95%, 96%, 97%, 98%, 99%, or 100% sequence identity to a naturally-occurring Cas12e, Cas12d, Cas13, Cas14a, Cas14b, Cas14c, Cas14d, Cas14e, Cas14f, Cas14g, Cas14h, Cas14u, or Cas Φ protein. In some embodiments, the Cas protein is a Cas12e, Cas12d, Cas13, or Cas Φ nickase.

### Flap Endonuclease

[0247] In some embodiments, a prime editor further comprises additional polypeptide components, for example, a flap endonuclease (FEN, e.g. FEN1). In some embodiments, the flap endonuclease excises the 5′ single stranded DNA of the edit strand of the double stranded target DNA (e.g., the target gene) and assists incorporation of the intended nucleotide edit into the double stranded target DNA (e.g., the target gene). In some embodiments, the FEN is linked or fused to another component. In some embodiments, the FEN is provided in trans, for example, as a separate polypeptide or polynucleotide encoding the FEN.

[0248] In some embodiments, a prime editor or prime editing composition comprises a flap nuclease. In some embodiments, the flap nuclease is a FEN1, or any FEN1 functional variant, functional mutant, or functional fragment thereof. In some embodiments, the flap nuclease has amino acid sequence that is at least about 70% identical, at least about 80% identical, at least about 90% identical, at least about 95% identical, at least about 96% identical, at least about 97% identical, at least about 98% identical, at least about 99% identical, at least about 99.5% identical, or at least about 99.9% identical to any of the flap nucleases described herein or known in the art.

### Nuclear Localization Sequences

[0249] In some embodiments, a prime editor further comprises one or more nuclear localization sequence (NLS). In some embodiments, the NLS helps promote translocation of a protein into the cell nucleus. In some embodiments, a prime editor comprises a fusion protein, e.g., a fusion protein comprising a DNA binding domain and a DNA polymerase, that comprises one or more NLSs. In some embodiments, one or more polypeptides of the prime editor are fused to or linked to one or more NLSs. In some embodiments, the prime editor comprises a DNA binding domain and a DNA polymerase domain that are provided in trans, wherein the DNA binding domain and/or the DNA polymerase domain is fused or linked to one or more NLSs.

[0250] In certain embodiments, a prime editor or prime editing complex comprises at least one NLS. In some embodiments, a prime editor or prime editing complex comprises at least two NLSs. In embodiments with at least two NLSs, the NLSs can be the same NLS, or they can be different NLSs.

[0251] In some instances, a prime editor may further comprise at least one nuclear localization sequence (NLS). In some cases, a prime editor may further comprise 1 NLS. In some cases, a prime editor may further comprise 2 NLSs.

[0252] In addition, the NLSs can be expressed as part of a prime editor complex. In some embodiments, a NLS can be positioned almost anywhere in a protein's amino acid sequence, and generally comprises a short sequence of three or more or four or more amino acids. The location of the NLS fusion can be at the N-terminus, the C-terminus, or positioned anywhere within a sequence of a prime editor or a component thereof (e.g., inserted between the DNA-binding domain and the DNA polymerase domain of a prime editor fusion protein, between the DNA binding domain and a linker sequence, between a DNA polymerase and a linker sequence, between two linker sequences of a prime editor fusion protein or a component thereof, in either N-terminus to C-terminus or C-terminus to N-terminus order). In some embodiments, a prime editor is fusion protein that comprises an NLS at the N terminus. In some embodiments, a prime editor is fusion protein that comprises an NLS at the C terminus. In some embodiments, a prime editor is fusion protein that comprises at least one NLS at both the N terminus and the C terminus. In some embodiments, the prime editor is a fusion protein that comprises two NLSs at the N terminus and/or the C terminus.

[0253] Any NLSs that are known in the art are also contemplated herein. The NLSs may be any naturally occurring NLS, or any non-naturally occurring NLS (e.g., an NLS with one or more mutations relative to a wild-type NLS). In some embodiments, the one or more NLSs of a prime editor comprise bipartite NLSs. In some embodiments, a nuclear localization signal (NLS) is predominantly basic. In some embodiments, the one or more NLSs of a prime editor are rich in lysine and arginine residues. In some embodiments, the one or more NLSs of a prime editor comprise proline residues. In some embodiments, a nuclear localization signal (NLS) comprises the sequence

(SEQ ID NO: 16)
MDSLLMNRRKFLYQFKNVRWAKGRRETYLC,
(SEQ ID NO: 8)
KRTADGSEFESPKKKRKV,
(SEQ ID NO: 11)
KRTADGSEFEPKKKRKV

[0254] In some embodiments, a NLS is a monopartite NLS. For example, in some embodiments, a NLS is a SV40 large T antigen NLS; PKKKRKV (SEQ ID NO: 12). In some embodiments, a NLS is a bipartite NLS. In some embodiments, a bipartite NLS comprises two basic domains separated by a spacer sequence comprising a variable number of amino acids. In some embodiments, a NLS is a bipartite NLS. In some embodiments, a bipartite NLS consists of two basic domains separated by a spacer sequence comprising a variable number of amino acids. In some embodiments, a NLS comprises an amino acid sequence that is at least about 50%, 60%, 70%, 80%, 90%, 91%, 92%, 93%, 94%, 95%, 96%, 97%, 98%, 99%, or 100% identical to the amino acid sequence of any one of SEQ ID NOs: 8-24 and 621. In some embodiments, a NLS comprises an amino acid sequence selected from the group consisting of 8-24 and 621. In some embodiments, a prime editing composition comprises a polynucleotide that encodes a NLS that comprises an amino acid sequence that is at least about 50%, 60%, 70%, 80%, 90%, 91%, 92%, 93%, 94%, 95%, 96%, 97%, 98%, 99%, or 100% identical to the amino acid sequence of any one of SEQ ID NOs: 8-24 and 621. In some embodiments, a prime editing composition comprises a polynucleotide that encodes a NLS that comprises an amino acid sequence selected from the group consisting of 8-24 and 621. In some embodiments, a polynucleotide (e.g., a DNA polynucleotide or a RNA polynucleotide) encoding a NLS comprises a nucleic acid sequence that is at least about 50%, 60%, 70%, 80%, 90%, 91%, 92%, 93%, 94%, 95%, 96%, 97%, 98%, 99%, or 100% identical to the nucleic acid sequence of any one of SEQ ID NOs: 637, 638, 631 or 632. In some embodiments, the polynucleotide sequence (e.g., a DNA polynucleotide) encoding a NLS comprises a nucleic acid sequence that is at least about 50%, 60%, 70%, 80%, 90%, 91%, 92%, 93%, 94%, 95%, 96%, 97%, 98%, 99%, or 100% identical to the nucleic acid sequence of any one of SEQ ID NOs: 637, or 631. In some embodiments, the polynucleotide sequence (e.g., a RNA polynucleotide) encoding a NLS comprises a nucleic acid sequence that is at least about 50%, 60%, 70%, 80%, 90%, 91%, 92%, 93%, 94%, 95%, 96%, 97%, 98%, 99%, or 100% identical to the nucleic acid sequence of any one of SEQ ID NOs: 638, or 632.

[0255] Any NLSs that are known in the art are also contemplated herein. The NLSs may be any naturally occurring NLS, or any non-naturally occurring NLS (e.g., an NLS with one or more mutations relative to a wild-type NLS). In some embodiments, the one or more NLSs of a prime editor comprise bipartite NLSs. In some embodiments, the one or more NLSs of a prime editor are rich in lysine and arginine residues. In some embodiments, the one or more NLSs of a prime editor comprise proline residues. Non-limiting examples of NLS sequences are provided in Table 2 below.

TABLE 2
Exemplary nuclear localization sequences

| | | SEQ ID |
|---|---|---|
| Description | Sequence | NO: |
| SV40 BPNLS | KRTADGSEFESPKKKRKV | 8 |
| SV40 BPNLS | MKRTADGSEFESPKKKRKV | 9 |
| with N | | |
| term | | |
| Methionine | | |
| c-Myc | PAAKRVKLDGGKRTADGSE | 10 |
| BPNLS-NLS | FESPKKKRKV | |
| c-myc BPNLS | MPAAKRVKLDGGKRTADGS | 621 |
| with N | EFESPKKKRKV | |
| term | | |
| Methionine | | |
| SV40 BPNLS1 | KRTADGSEFEPKKKRKV | 11 |
| SV40 NLS | PKKKRKV | 12 |
| BPNLS-NLS | KRTADSQHSTPPKTKRK | 13 |
| | VEFESPKKKRKV | |
| BPNLS-NLS1 | KRTADSQHSTPPKTKRK | 14 |
| | VEFEPKKKRKV | |
| NLS | MKRTADGSEFESPKKKRKV | 15 |
| NLS | MDSLLMNRRKFLYQFKN | 16 |
| | VRWAKGRRETYLC | |
| NLS of | AVKRPAATKKAGQAKKKKLD | 17 |
| Nucleoplasmin | | |
| NLS of EGL-13 | MSRRRKANPTKLSENAK | 18 |
| | KLAKEVEN | |
| NLS of C-Myc | PAAKRVKLD | 19 |
| NLS of | KLKIKRPVK | 20 |
| Tus-protein | | |
| NLS of | VSRKRPRP | 21 |
| polyoma large | | |
| T-AG | | |
| NLS of | EGAPPAKRAR | 22 |
| Hepatitis D | | |
| virus antigen | | |
| NLS of | PPQPKKKPLDGE | 23 |
| murine p53 | | |
| Exemplary | SGGSKRTADGSEFEPKKKRKV | 24 |
| linker-NLS | | |

### Linkers

[0256] Polypeptides comprising components of a prime editor, e.g., the DNA binding domain and the DNA polymerase domain, may be fused via linkers, e.g., peptide or non-peptide linkers or may be provided in trans relevant to each other. For example, a reverse transcriptase may be expressed, delivered, or otherwise provided as an individual component rather than as a part of a fusion protein with the DNA binding domain. In such cases, components of the prime editor may be associated through non-peptide linkages or co-localization functions. In some embodiments, a prime editor further comprises additional components capable of interacting with, associating with, or capable of recruiting other components of the prime editor or the prime editing system. For example, a prime editor may comprise an RNA-protein recruitment polypeptide that can associate with an RNA-protein recruitment RNA aptamer. In some embodiments, an RNA-protein recruitment polypeptide can recruit, or be recruited by, a specific RNA sequence.

[0257] Non-limiting examples of RNA-protein recruitment polypeptide and RNA aptamer pairs include a MS2 coat protein and a MS2 RNA hairpin, a PCP polypeptide and a PP7 RNA hairpin, a Coin polypeptide and a Coin RNA hairpin, a Ku protein and a telomerase Ku binding RNA motif, and a Sm7 protein and a telomerase Sm7 binding RNA motif. In some embodiments, the prime editor comprises a DNA binding domain fused or linked to an RNA-protein recruitment polypeptide. In some embodiments, the prime editor comprises a DNA polymerase domain fused or linked to an RNA-protein recruitment polypeptide. In some embodiments, the DNA binding domain and the DNA polymerase domain fused to the RNA-protein recruitment polypeptide, or the DNA binding domain fused to the RNA-protein recruitment polypeptide and the DNA polymerase domain are co-localized by the corresponding RNA-protein recruitment RNA aptamer of the RNA-protein recruitment polypeptide. In some embodiments, the corresponding RNA-protein recruitment RNA aptamer fused or linked to a portion of the PEgRNA or ngRNA. For example, an MS2 coat protein fused or linked to the DNA polymerase and a MS2 hairpin installed on the PEgRNA for co-localization of the DNA polymerase and the RNA-guided DNA binding domain (e.g., a Cas9 nickase).

[0258] In certain embodiments, components of a prime editor are directly fused to each other. In certain embodiments, components of a prime editor are associated to each other via a linker.

[0259] As used herein, a linker can be any chemical group or a molecule linking two molecules or moieties, e.g., a DNA binding domain and a DNA polymerase domain of a prime editor. In some embodiments, a linker is an organic molecule, group, polymer, or chemical moiety. In some embodiments, the linker comprises a non-peptide moiety. The linker may be as simple as a covalent bond, or it may be a polymeric linker many atoms in length, for example, a polynucleotide sequence. In some embodiments, the linker is a covalent bond (e.g., a carbon-carbon bond, disulfide bond, carbon-heteroatom bond, etc.). In certain embodiments, the linker is a carbon-nitrogen bond of an amide linkage. In some embodiments, the linker is a polymeric linker many atoms in length, for example, a polypeptide sequence.

[0260] In some embodiments, a linker joins two domains of a prime editor, for example, a DNA binding domain and a DNA polymerase domain. In some embodiments, linkers join each of, or at least two of, two or more domains of a prime editor, for example, a DNA binding domain, a DNA polymerase domain, a RNA-binding protein domain (e.g., a MS2 coat protein that binds to MS2 recruitment aptamer RNA sequence), and/or a flap nuclease domain. In some embodiments, linkers join each of, or at least two of, two or more domains of a prime editor, for example, a DNA binding domain, a DNA polymerase domain, an RNA-binding protein domain (e.g., a MS2 coat protein that binds to MS2 recruitment aptamer RNA sequence), a flap nuclease domain, and/or one or more nuclear localization sequences.

[0261] In some embodiments, the linker is an amino acid or is a peptide comprising a plurality of amino acids. In certain embodiments, two or more components of a prime editor are linked to each other by a peptide linker. In some embodiments, a peptide linker is 5-100 amino acids in length, for example, 2, 3, 4, 5, 6, 7, 8, 9, 10, 11, 12, 13, 14, 15, 16, 17, 18, 19, 20, 21, 22, 23, 24, 25, 26, 27, 28, 29, 30, 30-35, 35-40, 40-45, 45-50, 50-60, 60-70, 70-80, 80-90, 90-100, 100-120, 120-130, 130-140, 140-150, or 150-200 amino acids in length. In some embodiments, the peptide linker is 5, 6, 7, 8, 9, 10, 11, 12, 13, 14, 15, 16, 17, 18, 19, 20, 25, 35, 45, 50, 55, 60, 60, 65, 70, 70, 75, 80, 85, 90, 90, 95, 100, 101, 102, 103, 104, 105, 110, 120, 130, 140,150, 160, 175, 180, 190, or 200 amino acids in length. In some embodiments, the peptide linker is 5-100 amino acids in length. In some embodiments, the peptide linker is 10-80 amino acids in length. In some embodiments, the peptide linker is 15-70 amino acids in length. In some embodiments, the peptide linker is 16 amino acids in length, 24 amino acids in length, 64 amino acids in length, or 96 amino acids in length. In some embodiments, the peptide linker is at least 50 amino acids in length. In some embodiments, the peptide linker is at least 40 amino acids in length. In some embodiments, the peptide linker is at least 30 amino acids in length. In some embodiments, the peptide linker is 46 amino acids in length. In some embodiments, the peptide linker is 92 amino acids in length.

[0262] For example, the DNA binding domain and the DNA polymerase domain of a prime editor may be joined by a peptide or protein linker. In some embodiments, a prime editor comprises a fusion protein comprising one or more peptide linkers that join a DNA binding domain, e.g., a Cas9 nickase domain, and a DNA polymerase domain, e.g., a M-MLV reverse transcriptase domain.

[0263] In some other embodiments, the peptide linker comprises the amino acid motif GGGS (SEQ ID NO: 655), GGSS (SEQ ID NO: 648), GGS (SEQ ID NO: 287), GGGGS (SEQ ID NO: 656), SGGS (SEQ ID NO: 288), EAAAK (SEQ ID NO: 657), or any combination thereof. In some embodiments, the peptide linker comprises amino acid sequence (GGGGS)n (SEQ ID NO: 376), (G)n (SEQ ID NO: 377), (EAAAK)n (SEQ ID NO: 378), (GGS)n (SEQ ID NO: 379), (SGGS)n (SEQ ID NO: 380), (GGSS)n (SEQ ID NO: 381), (XP)n (SEQ ID NO: 382), or any combination thereof, wherein n is independently an integer between 1 and 30, and wherein X is any amino acid. In some embodiments, the peptide linker comprises the amino acid sequence (GGS)n (SEQ ID NO: 658), wherein n is 1, 3, or 7. In some embodiments, the peptide linker comprises the amino acid sequence SGSETPGTSESATPES (SEQ ID NO: 295), which may be referred to as an XTEN motif. In some embodiments, the peptide linker comprises 2, 3, 4, 5, or 6 contiguous XTEN motifs. In some embodiments, the peptide linker comprises the amino acid sequence SGGSSGGSSGSETPGTSESATPESSGGSSGGS (SEQ ID NO: 296). In some embodiments, the peptide linker comprises the amino acid sequence SGGSGGSGGS (SEQ ID NO: 383). In some embodiments, the peptide linker comprises the amino acid sequence SGGS (SEQ ID NO: 288). In other embodiments, the peptide linker comprises the amino acid sequence

(SEQ ID NO: 384)
SGGSSGGSSGSETPGTSESATPESAGSYPYDVPD
YAGSAAPAAKKKKLDGSGSGGSSGGS.

[0264] In some embodiments, the peptide linker comprises at least 2 GGSS motifs (SEQ ID NO: 659). In some embodiments, the peptide linker comprises at least 3 GGSS motifs (SEQ ID NO: 660). In some embodiments, the peptide linker comprises at least 4 GGSS motifs (SEQ ID NO: 661). In some embodiments, the peptide linker comprises at least 5 GGSS motifs (SEQ ID NO: 662). In some embodiments, the peptide linker comprises at least 6 GGSS motifs (SEQ ID NO: 663). In some embodiments, the peptide linker comprises at least 7 GGSS motifs (SEQ ID NO: 664). In some embodiments, the peptide linker comprises at least 8 GGSS motifs (SEQ ID NO: 665). In some embodiments, the peptide linker comprises at least 9 GGSS motifs (SEQ ID NO: 666). In some embodiments, the peptide linker comprises 7, 8, 9, 10, 11, 12, 13, 14, 15, 16, 17, 18, 19, or 20 GGSS motifs (SEQ ID NOS 664-677, respectively, in order of appearance). In some embodiments, the peptide linker comprises at least 2 contiguous GGSS motifs (SEQ ID NO: 659). In some embodiments, the peptide linker comprises at least 3 contiguous GGSS motifs (SEQ ID NO: 660). In some embodiments, the peptide linker comprises at least 4 contiguous GGSS motifs (SEQ ID NO: 661). In some embodiments, the peptide linker comprises at least 5 contiguous GGSS motifs (SEQ ID NO: 662). In some embodiments, the peptide linker comprises at least 6 contiguous GGSS motifs (SEQ ID NO: 663). In some embodiments, the peptide linker comprises at least 7 contiguous GGSS motifs (SEQ ID NO: 664). In some embodiments, the peptide linker comprises at least 8 contiguous GGSS motifs (SEQ ID NO: 665). In some embodiments, the peptide linker comprises at least 9 contiguous GGSS motifs (SEQ ID NO: 666). In some embodiments, the peptide linker comprises 7, 8, 9, 10, 11, 12, 13, 14, 15, 16, 17, 18, 19, or 20 contiguous GGSS motifs (SEQ ID NOS 664-677, respectively, in order of appearance). In some embodiments, the peptide linker further comprises at least one GGS motif (SEQ ID NO: 287). In some embodiments, the peptide linker comprises at least one GGS motif (SEQ ID NO: 287) and 3, 4, 5, 6, 7, 8, 9, 10, 11, 12, 13, 14, 15, 16, 17, 18, 19, or 20 GGSS motifs (SEQ ID NOS 660-677, respectively, in order of appearance). In some embodiments, the peptide linker comprises at least one GGS motif (SEQ ID NO: 287) and 3, 4, 5, 6, 7, 8, 9, 10, 11, 12, 13, 14, 15, 16, 17, 18, 19, or 20 contiguous GGSS motifs (SEQ ID NOS 660-677, respectively, in order of appearance). In some embodiments, the peptide linker comprises 2, 3, 4, 5, 6, 7, 8, 9, 10, 11, 12, 13, 14, 15, 16, 17, 18, 19, or 20 GGS motifs (SEQ ID NOS 678-696, respectively, in order of appearance) and 3, 4, 5, 6, 7, 8, 9, 10, 11, 12, 13, 14, 15, 16, 17, 18, 19, or 20 GGSS motifs (SEQ ID NOS 660-677, respectively, in order of appearance). In some embodiments, the peptide linker comprises 2, 3, 4, 5, 6, 7, 8, 9, 10, 11, 12, 13, 14, 15, 16, 17, 18, 19, or 20 GGS motifs (SEQ ID NOS 678-696, respectively, in order of appearance) and 3, 4, 5, 6, 7, 8, 9, 10, 11, 12, 13, 14, 15, 16, 17, 18, 19, or 20 contiguous GGSS motifs (SEQ ID NOS 660-677, respectively, in order of appearance).

[0265] In some embodiments, the peptide linker comprises at least 2 SGGS motifs (SEQ ID NO: 882). In some embodiments, the peptide linker comprises at least 3 SGGS motifs (SEQ ID NO: 883). In some embodiments, the peptide linker comprises at least 4 SGGS motifs (SEQ ID NO: 305). In some embodiments, the peptide linker comprises at least 5 SGGS motifs (SEQ ID NO: 304). In some embodiments, the peptide linker comprises at least 6 SGGS motifs (SEQ ID NO: 303). In some embodiments, the peptide linker comprises at least 7 SGGS motifs (SEQ ID NO: 884). In some embodiments, the peptide linker comprises at least 8 SGGS motifs (SEQ ID NO: 302). In some embodiments, the peptide linker comprises at least 9 SGGS motifs (SEQ ID NO: 885). In some embodiments, the peptide linker comprises 7, 8, 9, 10, 11, 12, 13, 14, 15, 16, 17, 18, 19, or 20 SGGS motifs (SEQ ID NOS 884, 302, 885, 301, 358-360, 886-892, respectively, in order of appearance). In some embodiments, the peptide linker comprises at least 2 contiguous SGGS motifs (SEQ ID NO: 882). In some embodiments, the peptide linker comprises at least 3 contiguous SGGS motifs (SEQ ID NO: 883). In some embodiments, the peptide linker comprises at least 4 contiguous SGGS motifs (SEQ ID NO: 305). In some embodiments, the peptide linker comprises at least 5 contiguous SGGS motifs (SEQ ID NO: 304). In some embodiments, the peptide linker comprises at least 6 contiguous SGGS motifs (SEQ ID NO: 303). In some embodiments, the peptide linker comprises at least 7 contiguous SGGS motifs (SEQ ID NO: 884). In some embodiments, the peptide linker comprises at least 8 contiguous SGGS motifs (SEQ ID NO: 302). In some embodiments, the peptide linker comprises at least 9 contiguous SGGS motifs (SEQ ID NO: 885). In some embodiments, the peptide linker comprises 7, 8, 9, 10, 11, 12, 13, 14, 15, 16, 17, 18, 19, or 20 contiguous SGGS motifs (SEQ ID NOS 884, 302, 885, 301, 358-360, 886-892, respectively, in order of appearance). In some embodiments, the peptide linker further comprises at least one GGS motif (SEQ ID NO: 287). In some embodiments, the peptide linker comprises at least one GGS motif (SEQ ID NO: 287) and 3, 4, 5, 6, 7, 8, 9, 10, 11, 12, 13, 14, 15, 16, 17, 18, 19, or 20 SGGS motifs (SEQ ID NOS 883, 305, 304, 303, 884, 302, 885, 301, 358-360, 886-892, respectively, in order of appearance). In some embodiments, the peptide linker comprises at least one GGS motif (SEQ ID NO: 287) and 3, 4, 5, 6, 7, 8, 9, 10, 11, 12, 13, 14, 15, 16, 17, 18, 19, or 20 contiguous SGGS motifs (SEQ ID NOS 883, 305, 304, 303, 884, 302, 885, 301, 358-360, 886-892, respectively, in order of appearance). In some embodiments, the peptide linker comprises 2, 3, 4, 5, 6, 7, 8, 9, 10, 11, 12, 13, 14, 15, 16, 17, 18, 19, or 20 GGS motifs (SEQ ID NOS 678-696, respectively, in order of appearance) and 3, 4, 5, 6, 7, 8, 9, 10, 11, 12, 13, 14, 15, 16, 17, 18, 19, or 20 SGGS motifs (883, 305, 304, 303, 884, 302, 885, 301, 358-360, 886-892, respectively, in order of appearance). In some embodiments, the peptide linker comprises 2, 3, 4, 5, 6, 7, 8, 9, 10, 11, 12, 13, 14, 15, 16, 17, 18, 19, or 20 GGS motifs (SEQ ID NOS 678-696, respectively, in order of appearance) and 3, 4, 5, 6, 7, 8, 9, 10, 11, 12, 13, 14, 15, 16, 17, 18, 19, or 20 contiguous SGGS motifs (SEQ ID NOS 883, 305, 304, 303, 884, 302, 885, 301, 358-360, 886-892, respectively, in order of appearance).

[0266] In some embodiments, the peptide linker comprises at least 3 EAAAK motifs (SEQ ID NO: 697). In some embodiments, the peptide linker comprises at least 4 EAAAK motifs (SEQ ID NO: 650). In some embodiments, the peptide linker comprises at least 5 EAAAK motifs (SEQ ID NO: 698). In some embodiments, the peptide linker comprises at least 6 EAAAK motifs (SEQ ID NO: 699). In some embodiments, the peptide linker comprises at least 7 EAAAK motifs (SEQ ID NO: 700). In some embodiments, the peptide linker comprises at least 8 EAAAK motifs (SEQ ID NO: 651). In some embodiments, the peptide linker comprises at least 9 EAAAK motifs (SEQ ID NO: 701). In some embodiments, the peptide linker comprises 7, 8, 9, 10, 11, 12, 13, 14, 15, 16, 17, 18, 19, or 20 EAAAK motifs (SEQ ID NOS 700, 651, 701-712, respectively, in order of appearance). In some embodiments, the peptide linker comprises at least 3 contiguous EAAAK motifs (SEQ ID NO: 697). In some embodiments, the peptide linker comprises at least 4 contiguous EAAAK motifs (SEQ ID NO: 650). In some embodiments, the peptide linker comprises at least 5 contiguous EAAAK motifs (SEQ ID NO: 698). In some embodiments, the peptide linker comprises at least 6 contiguous EAAAK motifs (SEQ ID NO: 699). In some embodiments, the peptide linker comprises at least 7 contiguous EAAAK motifs (SEQ ID NO: 700). In some embodiments, the peptide linker comprises at least 8 contiguous EAAAK motifs (SEQ ID NO: 651). In some embodiments, the peptide linker comprises at least 9 contiguous EAAAK motifs (SEQ ID NO: 701). In some embodiments, the peptide linker comprises 7, 8, 9, 10, 11, 12, 13, 14, 15, 16, 17, 18, 19, or 20 contiguous EAAAK motifs (SEQ ID NOS 700, 651, 701-712, respectively, in order of appearance). In some embodiments, the peptide linker further comprises at least one GGS motif. In some embodiments, the peptide linker comprises at least one GGS motif (SEQ ID NO: 287) and 3, 4, 5, 6, 7, 8, 9, 10, 11, 12, 13, 14, 15, 16, 17, 18, 19, or 20 EAAAK motifs (SEQ ID NOS 697, 650, 698-700, 651 and 701-712, respectively, in order of appearance). In some embodiments, the peptide linker comprises at least one GGS motif (SEQ ID NO: 287) and 3, 4, 5, 6, 7, 8, 9, 10, 11, 12, 13, 14, 15, 16, 17, 18, 19, or 20 contiguous EAAAK motifs (SEQ ID NOS 697, 650, 698-700, 651 and 701-712, respectively, in order of appearance). In some embodiments, the peptide linker comprises 2, 3, 4, 5, 6, 7, 8, 9, 10, 11, 12, 13, 14, 15, 16, 17, 18, 19, or 20 GGS motifs (SEQ ID NOS 678-696, respectively, in order of appearance) and 3, 4, 5, 6, 7, 8, 9, 10, 11, 12, 13, 14, 15, 16, 17, 18, 19, or 20 EAAAK motifs (SEQ ID NOS 697, 650, 698-700, 651 and 701-712, respectively, in order of appearance). In some embodiments, the peptide linker comprises 2, 3, 4, 5, 6, 7, 8, 9, 10, 11, 12, 13, 14, 15, 16, 17, 18, 19, or 20 GGS motifs (SEQ ID NOS 678-696, respectively, in order of appearance) and 3, 4, 5, 6, 7, 8, 9, 10, 11, 12, 13, 14, 15, 16, 17, 18, 19, or 20 contiguous EAAAK motifs (SEQ ID NOS 697, 650, 698-700, 651 and 701-712, respectively, in order of appearance).

[0267] In some embodiments, the peptide linker comprises the amino acid sequence of (GGSS)m-(GGS)n, wherein m and n are each any integer between 0 and 50 (SEQ ID NO: 713). In some embodiments, m and n are the same. In some embodiments, m and n are different. In some embodiments, the peptide linker comprises the amino acid sequence of (SEQ ID NO:385). In some embodiments, the peptide linker comprises the amino acid sequence of (SEQ ID NO:386). In some embodiments, the peptide linker comprises the amino acid sequence of (SEQ ID NO:387). In some embodiments, the peptide linker comprises the amino acid sequence of (SEQ ID NO:388). In some embodiments, the peptide linker comprises the amino acid sequence of (SEQ ID NO:389). In some embodiments, the peptide linker comprises the amino acid sequence of (SEQ ID NO:390). In some embodiments, the peptide linker comprises the amino acid sequence of (SEQ ID NO:391). In some embodiments, the peptide linker comprises the amino acid sequence of ((SEQ ID NO:392). In some embodiments, the peptide linker comprises the amino acid sequence of (SEQ ID NO:393). In some embodiments, the peptide linker comprises the amino acid sequence of (SEQ ID NO:394). In some embodiments, the peptide linker comprises the amino acid sequence of (SEQ ID NO:395). In some embodiments, the peptide linker comprises the amino acid sequence of (SEQ ID NO:396). In some embodiments, the peptide linker comprises the amino acid sequence of (SEQ ID NO:397). In some embodiments, the peptide linker comprises the amino acid sequence of (SEQ ID NO:398). In some embodiments, the peptide linker comprises the amino acid sequence of (SEQ ID NO:399). In some embodiments, the peptide linker comprises the amino acid sequence of (SEQ ID NO:400). In some embodiments, the peptide linker comprises the amino acid sequence of (SEQ ID NO:401). In some embodiments, the peptide linker comprises the amino acid sequence of (SEQ ID NO:402). In some embodiments, the peptide linker comprises the amino acid sequence of (SEQ ID NO:403). In some embodiments, the peptide linker comprises the amino acid sequence of (SEQ ID NO:404). In some embodiments, the peptide linker comprises the amino acid sequence of (SEQ ID NO:405). In some embodiments, the peptide linker comprises the amino acid sequence of (SEQ ID NO:406). In some embodiments, the peptide linker comprises the amino acid sequence of (SEQ ID NO:407). In some embodiments, the peptide linker comprises the amino acid sequence of (SEQ ID NO:408). In some embodiments, the peptide linker comprises the amino acid sequence of (SEQ ID NO:409). In some embodiments, the peptide linker comprises the amino acid sequence of (SEQ ID NO:410). In some embodiments, the peptide linker comprises the amino acid sequence of (SEQ ID NO:411). In some embodiments, the peptide linker comprises the amino acid sequence of any one of SEQ ID NOs: 286-411.

[0268] Exemplary peptide linker sequences are provided in Table 3 below:

TABLE 3
Exemplary peptide linker sequences.

| New | |
|---|---|
| SEQ ID | Linker sequence |
| 286 | GS |
| 287 | GGS |
| 288 | SGGS |
| 289 | SGGSSGGSSGSETPGTSESATPESSGGSSGGSS |
| 290 | SGGSSGGSSGSETPGTSESATPESSGSETPGTSESATPESSGGSSGGS |
| 291 | SGGSSGSETPGTSESATPESSGSETPGTSESATPESSGGS |
| 292 | SGGSSGGSSGSETPGTSESATPESSGGS |
| 293 | SGGSSGSETPGTSESATPESSGGS |
| 294 | SGGSSGSETPGTSESATPES |
| 295 | SGSETPGTSESATPES |
| 296 | SGGSSGGSSGSETPGTSESATPESSGGSSGGS |
| 297 | SGGSPAPAPAPAPAPAPAPAPAPAPAPAPAPAPAPAPSGGS |
| 298 | SGGSPAPAPAPAPAPAPAPAPAPAPAPAPSGGS |
| 299 | SGGSPAPAPAPAPAPAPAPAPSGGS |
| 300 | SGGSPAPAPAPAPAPSGGS |
| 301 | SGGSSGGSSGGSSGGSSGGSSGGSSGGSSGGSSGGSSGGS |
| 302 | SGGSSGGSSGGSSGGSSGGSSGGSSGGSSGGS |
| 303 | SGGSSGGSSGGSSGGSSGGSSGGS |
| 304 | SGGSSGGSSGGSSGGSSGGS |
| 305 | SGGSSGGSSGGSSGGS |
| 306 | SGGSEAAAKEAAAKEAAAKEAAAKEAAAKEAAAKEAAAKEAAAKSGGS |
| 307 | SGGSEAAAKEAAAKEAAAKEAAAKEAAAKEAAAKSGGS |
| 308 | AEAAAKEAAAKEAAAKEAAAKA |
| 309 | SGGSEAAAKEAAAKEAAAKEAAAKSGGS |
| 310 | SGGSEAAAKEAAAKEAAAKSGGS |
| 311 | SGGSEAAAKEAAAKSGGS |
| 312 | GGGSSGGSSGSETPGTSESATPESSGGSSGGSS |
| 313 | GGGSSGGSSGSETPGTSESATPESSGSETPGTSESATPESSGGSSGGS |
| 314 | GGGSSGSETPGTSESATPESSGSETPGTSESATPESSGGS |
| 315 | GGGSSGGSSGSETPGTSESATPESSGGS |
| 316 | GGGSSGSETPGTSESATPESSGGS |
| 317 | GGGSSGSETPGTSESATPES |
| 318 | GGSETPGTSESATPES |
| 319 | GGGSSGGSSGSETPGTSESATPESSGGSSGGS |
| 320 | GGGSPAPAPAPAPAPAPAPAPAPAPAPAPAPAPAPAPSGGS |
| 321 | GGGSPAPAPAPAPAPAPAPAPAPAPAPAPSGGS |
| 322 | GGGSPAPAPAPAPAPAPAPAPSGGS |
| 323 | GGGSPAPAPAPAPAPSGGS |
| 324 | GGGSSGGSSGGSSGGSSGGSSGGSSGGSSGGSSGGSSGGS |
| 325 | GGGSSGGSSGGSSGGSSGGSSGGSSGGSSGGS |
| 326 | GGGSSGGSSGGSSGGSSGGSSGGS |
| 327 | GGGSSGGSSGGSSGGSSGGS |
| 328 | GGGSSGGSSGGSSGGS |
| 329 | GGGSEAAAKEAAAKEAAAKEAAAKEAAAKEAAAKEAAAKEAAAKSGGS |
| 330 | GGGSEAAAKEAAAKEAAAKEAAAKEAAAKEAAAKSGGS |
| 331 | GEAAAKEAAAKEAAAKEAAAKA |
| 332 | GGGSEAAAKEAAAKEAAAKEAAAKSGGS |
| 333 | GGGSEAAAKEAAAKEAAAKSGGS |
| 334 | GGGSEAAAKEAAAKSGGS |
| 335 | SGGSEAAAKEAAAKSGGSSGGSSGSETPGTSESATPESSGGSSGGSS |
| 336 | SGGSEAAAKEAAAKSGGSSGGSSGSETPGTSESATPESSGSETPGTS |
| | ESATPESSGGSSGGS |
| 337 | SGGSEAAAKEAAAKSGGSSGSETPGTSESATPESSGSETPGTSESATPESSGGS |
| 338 | SGGSEAAAKEAAAKSGGSSGGSSGSETPGTSESATPESSGGS |
| 339 | SGGSEAAAKEAAAKSGGSSGSETPGTSESATPESSGGS |
| 340 | SGGSEAAAKEAAAKSGGSSGSETPGTSESATPES |
| 341 | SGGSEAAAKEAAAKSGSETPGTSESATPES |
| 342 | SGGSEAAAKEAAAKSGGSSGGSSGSETPGTSESATPESSGGSSGGS |
| 343 | SGGSEAAAKEAAAKSGGSPAPAPAPAPAPAPAPAPAPAPAPAPAPAPAPAPSGGS |
| 344 | SGGSEAAAKEAAAKSGGSPAPAPAPAPAPAPAPAPAPAPAPAPSGGS |
| 345 | SGGSEAAAKEAAAKSGGSPAPAPAPAPAPAPAPAPSGGS |
| 346 | SGGSEAAAKEAAAKSGGSPAPAPAPAPAPSGGS |
| 347 | SGGSEAAAKEAAAKSGGSSGGSSGGSSGSSGGSSGGSSGGSSGGSSGGSSGGS |
| 348 | SGGSEAAAKEAAAKSGGSSGGSSGGSSGGSSGGSSGGSSGGSSGGS |
| 349 | SGGSEAAAKEAAAKSGGSSGGSSGGSSGGSSGGSSGGS |
| 350 | SGGSEAAAKEAAAKSGGSSGGSSGGSSGGSSGGS |
| 351 | SGGSEAAAKEAAAKSGGSSGGSSGGSSGGS |
| 352 | SGGSEAAAKEAAAKSGGSEAAAKEAAAKEAAAKEAAAKEAAAKEAAAK |
| | EAAAKEAAAKSGGS |
| 353 | SGGSEAAAKEAAAKSGGSEAAAKEAAAKEAAAKEAAAKEAAAKEAAAKSGGS |
| 354 | SGGSEAAAKEAAAKAEAAAKEAAAKEAAAKEAAAKA |
| 355 | SGGSEAAAKEAAAKSGGSEAAAKEAAAKEAAAKEAAAKSGGS |
| 356 | SGGSEAAAKEAAAKSGGSEAAAKEAAAKEAAAKSGGS |
| 357 | SGGSEAAAKEAAAKSGGSEAAAKEAAAKSGGS |
| 358 | SGGSSGGSSGGSSGGSSGGSSGGSSGGSSGGSSGGSSGGSSGGS |
| 359 | SGGSSGGSSGGSSGGSSGGSSSGGSSGGSSGGSSGGS |
| 360 | SGGSSGGSSGGSSGGSSGGSSGGSSGGSSGGSSGGSSGGSSGGSSGGSSGGS |
| 361 | SGGSGGSGSETPGTSESATPESSGGSGGS |
| 362 | SGGSGGSGSETPGTSESATPESSGSETPGTSESATPESSGGSGGS |
| 363 | SGGSGSETPGTSESATPESSGSETPGTSESATPESSGGS |
| 364 | SGGSGGSGSETPGTSESATPESSGGS |
| 365 | SGGSGSETPGTSESATPESSGGS |
| 366 | SGGSGSETPGTSESATPES |
| 367 | SGGSGGSGGSGGSGGSGGSGGSGGSGGSGGS |
| 368 | SGGSGGSGGSGGSGGSGGSGGSGGS |
| 369 | SGGSGGSGGSGGSGGSGGS |
| 370 | SGGSGGSGGSGGSGGS |
| 371 | SGGSGGSGGSGGS |
| 372 | GGSPAPAPAPAPAPAPAPAPAPAPAPAPAPAPAPAPSGGS |
| 373 | GGSPAPAPAPAPAPAPAPAPAPAPAPAPSGGS |
| 374 | GGSPAPAPAPAPAPAPAPAPSGGS |
| 375 | GGSPAPAPAPAPAPSGGS |
| 376 | (GGGGS)n |
| 377 | (G)n |
| 378 | (EAAAK)n |
| 379 | (GGS)n |
| 380 | (SGGS)n |
| 381 | (GGSS)n |
| 382 | (XP)n |
| 383 | SGGSGGSGGS |
| 384 | SGGSSGGSSGSETPGTSESATPESAGSYPYDVPDYAGSAAPAAKKKKLDGSGSGGS |
| | SGGS |
| 385 | GGSSGGSSGGSSGGSSGGSSGGSSGGSSGGSSGGSSGGSSGGSSGGSSGGS |
| 386 | GGSSGGSSGGSSGGSSGGSSGGSSGGSSGGSSGGSSGGSSGGSSGGS |
| 387 | GGSSGGSSGGSSGGSSGGSSGGSSGGSSGGSSGGSSGGSSGGS |
| 388 | GGSSGGSSGGSSGGSSGGSSGGSSGGSSGGSSGGSSGGS |
| 389 | GGSSGGSSGGSSGGSSGGSSGGSSGGSSGGSSGGS |
| 390 | GGSSGGSSGGSSGGSSGGSSGGSSGGSSGGS |
| 391 | GGSSGGSSGGSSGGSSGGSSGGSSGGS |
| 392 | GGSSGGSSGGSSGGSSGGSSGGS |
| 393 | GGSSGGSSGGSSGGSSGGS |
| 394 | GGSSGGSSGGSSGGS |
| 395 | GGSSGGSSGGS |
| 396 | GGSSGGS |
| 397 | GGSEAAAKEAAAKEAAAKEAAAKEAAAKEAAAKEAAAKEAAAKEAAAKEAAAKGGS |
| 398 | GGSEAAAKEAAAKEAAAKEAAAKEAAAKEAAAKEAAAKEAAAKEAAAKGGS |
| 399 | GGSEAAAKEAAAKEAAAKEAAAKEAAAKEAAAKEAAAKEAAAKGGS |
| 400 | GGSEAAAKEAAAKEAAAKEAAAKEAAAKEAAAKEAAAKGGS |
| 401 | GGSEAAAKEAAAKEAAAKEAAAKEAAAKEAAAKGGS |
| 402 | GGSEAAAKEAAAKEAAAKEAAAKEAAAKGGS |
| 403 | GGSEAAAKEAAAKEAAAKEAAAKGGS |
| 404 | GGSEAAAKEAAAKEAAAKGGS |
| 405 | GGSEAAAKEAAAKGGS |
| 406 | GGSEAAAKGGS |
| 407 | GGSSSGSETPGTSESATPESSGSETPGTSESATPESSGSETPGTSESATPESSG |
| | SETPGTSESATPESSGSETPGTSESATPESGGSS |
| 408 | GGSSSGSETPGTSESATPESSGSETPGTSESATPESSGSETPGTSESATPESSG |
| | SETPGTSESATPESGGSS |
| 409 | GGSSSGSETPGTSESATPESSGSETPGTSESATPESSGSETPGTSESATPESGGSS |
| 410 | GGSSSGSETPGTSESATPESSGSETPGTSESATPESGGSS |
| 411 | GGSSSGSETPGTSESATPESGGSS |

[0269] In some embodiments, two or more polypeptide components of a prime editor are linked to each other by a non-peptide linker. In some embodiments, the linker comprises a non-peptide moiety. In some embodiments, the linker is a carbon-nitrogen bond of an amide linkage. In certain embodiments, the linker is a cyclic or acyclic, substituted or unsubstituted, branched or unbranched aliphatic or heteroaliphatic linker. In certain embodiments, the linker is polymeric (e.g., polyethylene, polyethylene glycol, polyamide, polyester, etc.). In certain embodiments, the linker comprises a monomer, dimer, or polymer of aminoalkanoic acid. In certain embodiments, the linker comprises an aminoalkanoic acid (e.g., glycine, ethanoic acid, alanine, beta-alanine, 3-aminopropanoic acid, 4-aminobutanoic acid, 5-pentanoic acid, etc.). In certain embodiments, the linker comprises a monomer, dimer, or polymer of aminohexanoic acid (Ahx). In certain embodiments, the linker is based on a carbocyclic moiety (e.g., cyclopentane, cyclohexane). In other embodiments, the linker comprises a polyethylene glycol moiety (PEG). In certain embodiments, the linker comprises an aryl or heteroaryl moiety. In certain embodiments, the linker is based on a phenyl ring. The linker may include functionalized moieties to facilitate attachment of a nucleophile (e.g., thiol, amino) from the peptide to the linker. Any electrophile may be used as part of the linker. Exemplary electrophiles include, but are not limited to, activated esters, activated amides, Michael acceptors, alkyl halides, aryl halides, acyl halides, and isothiocyanates.

[0270] Components of a prime editor may be connected to each other in any order. In some embodiments, the DNA binding domain and the DNA polymerase domain of a prime editor may be fused to form a fusion protein, or may be joined by a peptide or protein linker, in any order from the N terminus to the C terminus. In some embodiments, a prime editor comprises a DNA binding domain fused or linked to the C-terminal end of a DNA polymerase domain. In some embodiments, a prime editor comprises a DNA binding domain fused or linked to the N-terminal end of a DNA polymerase domain. In some embodiments, the prime editor comprises a fusion protein comprising the structure NH2-[DNA binding domain]-[DNA polymerase]-COOH; or NH2-[polymerase]-[DNA binding domain]-COOH, wherein each instance of “]-[” indicates the presence of an optional linker sequence. In some embodiments, a prime editor comprises a fusion protein and a DNA polymerase domain provided in trans, wherein the fusion protein comprises the structure NH2-[DNA binding domain]-[RNA-protein recruitment polypeptide]-COOH. In some embodiments, a prime editor comprises a fusion protein and a DNA binding domain provided in trans, wherein the fusion protein comprises the structure NH2-[DNA polymerase domain]-[RNA-protein recruitment polypeptide]-COOH.

[0271] In addition, the NLSs may be expressed as part of a prime editor composition, fusion protein, or complex. The location of the NLS fusion can be at the N-terminus, the C-terminus, or positioned anywhere within a sequence of a prime editor or a component thereof (e.g., inserted between the DNA binding domain and the DNA polymerase domain of a prime editor fusion protein, between the DNA binding domain and a linker sequence, between a DNA polymerase and a linker sequence, between two linker sequences of a prime editor fusion protein or a component thereof, in either N-terminus to C-terminus or C-terminus to N-terminus order). In some embodiments, a prime editor is a fusion protein that comprises an NLS at the N terminus. In some embodiments, a prime editor is a fusion protein that comprises an NLS at the C terminus. In some embodiments, a prime editor is a fusion protein that comprises at least one NLS at both the N terminus and the C terminus. In some embodiments, the prime editor is a fusion protein that comprises two NLSs at the N terminus and/or the C terminus.

[0272] In some embodiments, a prime editing comprises a fusion protein that comprises one or more peptide linkers and one or more NLSs. In some embodiments, a prime editor fusion protein comprises one or more a bipartite NLSs. In some embodiments, a prime editor fusion protein comprises one or more bipartite NLSs and one or more peptide linkers. In some embodiments, a prime editor fusion protein comprises two bipartite NLSs and one or more peptide linkers. In some embodiments, the one or more bipartite NLSs are cmyc bipartite NLSs. In some embodiments, the two bipartite NLSs are each at the N-terminus and the C-terminus of the prime editor fusion protein, respectively. In some embodiments, a prime editor fusion protein comprises a bipartite NLSs and a XTEN linker. In some embodiments, a prime editor fusion protein comprises two bipartite NLSs and a XTEN linker. In some embodiments, a prime editor fusion protein comprises a bipartite NLSs and a peptide linker comprising a (GGSS) motif. In some embodiments, a prime editor fusion protein comprises two bipartite NLSs and a peptide linker comprising a (GGSS) motif. In some embodiments, a prime editor fusion protein comprises a bipartite NLSs and a peptide linker comprising 1, 2, 3, 4, 5, 7, 8, 9, 10, 11, 12, or more (GGSS) motifs. In some embodiments, a prime editor fusion protein comprises two bipartite NLSs and a peptide linker comprising 1, 2, 3, 4, 5, 7, 8, 9, 10, 11, 12, or more (GGSS) motifs. In some embodiments, a prime editor fusion protein comprises a bipartite NLSs and a peptide linker comprising 1, 2, 3, 4, 5, 7, 8, 9, 10, 11, 12, or more (EAAAK) motifs. In some embodiments, a prime editor fusion protein comprises two bipartite NLSs and a peptide linker comprising 1, 2, 3, 4, 5, 7, 8, 9, 10, 11, 12, or more (EAAAK) motifs.

[0273] In some embodiments, a prime editor comprises a fusion protein comprising a DNA binding domain (e.g., Cas9(H840A)) and a reverse transcriptase (e.g., a variant MMLV RT) having the of the following structure, from N-terminus to C-terminus: [NLS]-[Cas9(H840A)]-[peptide linker]-[MMLV_RT(D200N)(T330P)(L603W)(T306K)(W313F)], wherein amino acid substitutions are indicated in parentheses.

[0274] In some embodiments, a prime editor comprises a fusion protein comprising the structure, from N-terminus to C-terminus:
[0275] [NLS1]-[DNA binding domain]-[peptide linker]-[Reverse transcriptase];
[0276] [DNA binding domain]-[peptide linker]-[Reverse transcriptase]-[NLS1];
[0277] [NLS1]-[DNA binding domain]-[peptide linker]-[Reverse transcriptase]-[NLS2];
[0278] [NLS1]-[NLS2]-[DNA binding domain]-[peptide linker]-[Reverse transcriptase]-[NLS];
[0279] [NLS1]-[NLS2]-[DNA binding domain]-[peptide linker]-[Reverse transcriptase]-[NLS3]-[NLS4];
[0280] [NLS1]-[DNA binding domain]-[peptide linker]-[Reverse transcriptase]-[NLS2]-[NLS3];
[0281] [NLS1]-[NLS2]-[NLS3]-[DNA binding domain]-[peptide linker]-[Reverse transcriptase]-[NLS4];
[0282] [NLS1]-[NLS2]-[NLS3]-[DNA binding domain]-[peptide linker]-[Reverse transcriptase]-[NLS4]-[NLS5];
[0283] [NLS1]-[NLS2]-[NLS3]-[DNA binding domain]-[peptide linker]-[Reverse transcriptase]-[NLS4]-[NLS5]-[NLS6];
[0284] [NLS1]-[DNA binding domain]-[peptide linker]-[Reverse transcriptase]-[NLS2]-[NLS3]-[NLS4];
[0285] [NLS1]-[NLS2]-[DNA binding domain]-[peptide linker]-[Reverse transcriptase]-[NLS3]-[NLS4]-[NLS5];
[0286] [NLS1]-[Reverse transcriptase]-[peptide linker]-[DNA binding domain];
[0287] [Reverse transcriptase]-[peptide linker]-[DNA binding domain]-[NLS1];
[0288] [NLS1]-[Reverse transcriptase]-[peptide linker]-[DNA binding domain]-[NLS2];
[0289] [NLS1]-[NLS2]-[Reverse transcriptase]-[peptide linker]-[DNA binding domain]-[NLS];
[0290] [NLS1]-[NLS2]-[Reverse transcriptase]-[peptide linker]-[DNA binding domain]-[NLS3]-[NLS4];
[0291] [NLS1]-[Reverse transcriptase]-[peptide linker]-[DNA binding domain]-[NLS2]-[NLS3];
[0292] [NLS1]-[NLS2]-[NLS3]-[Reverse transcriptase]-[peptide linker]-[DNA binding domain]-[NLS4];
[0293] [NLS1]-[NLS2]-[NLS3]-[Reverse transcriptase]-[peptide linker]-[DNA binding domain]-[NLS4]-[NLS5];
[0294] [NLS1]-[NLS2]-[NLS3]-[Reverse transcriptase]-[peptide linker]-[DNA binding domain]-[NLS4]-[NLS5]-[NLS6];
[0295] [NLS1]-[Reverse transcriptase]-[peptide linker]-[DNA binding domain]-[NLS2]-[NLS3]-[NLS4]; or
[0296] [NLS1]-[NLS2]-[Reverse transcriptase]-[peptide linker]-[DNA binding domain]-[NLS3]-[NLS4]-[NLS5].

[0297] In some embodiments, a prime editor fusion protein comprises the structure, from N-terminus to C-terminus:
[0298] [NLS]n-[DNA binding domain]-[peptide linker]-[Reverse transcriptase]-[NLS]m, or [NLS]n-[Reverse transcriptase]-[peptide linker]-[DNA binding domain]-[NLS]m, wherein n and m are any integer between 0 and 50, wherein [NLS]n refers to n NLS motif sequences, and wherein [NLS]m refers to m NLS motif sequences. The n NLS motif sequences may or may not be the same. In some embodiments, m and n are the same. In some embodiments, n and m are different.

[0299] The DNA polymerase can be any of the DNA polymerase described herein or known in the art. In some embodiments, the DNA polymerase is a Cas9 nickase (nCas9). In some embodiments, the DNA polymerase is a nCas9 comprising a nuclease inactivating amino acid substitution in a HNH domain. In some embodiments, the DNA polymerase is a nCas9 comprising a H840A amino acid substitution as compared to a wild type SpCas9.

[0300] The Reverse transcriptase can be any of the reverse transcriptase described herein or known in the art. In some embodiments, the reverse transcriptase is a M-MLV RT. In some embodiments, the reverse transcriptase is a M-MLV RT functional variant with any one of the amino acid substitutions or truncations as described herein. In some embodiments.

[0301] In some embodiments, any one of NLS1, NLS2, NLS3, NLS4, NLS5, NLS6 is independently a NLS known in the art or described herein. In some embodiments, any one of NLS1, NLS2, NLS3, NLS4, NLS5, NLS6 is a bipartite NLS. In some embodiments, any one of NLS1, NLS2, NLS3, NLS4, NLS5, NLS6 is a c-Myc NLS comprising the amino acid sequence PAAKRVKLD (SEQ ID NO: 19). In some embodiments, any one of NLS1, NLS2, NLS3, NLS4, NLS5, NLS6 is a monopartite NLS. In some embodiments, any one of NLS1, NLS2, NLS3, NLS4, NLS5, NLS6 is a SV40NLS.

[0302] In some embodiments, two or more of the NLSs1-6 are the same. In some embodiments, the NLSs 1-6 are different from each other.

[0303] In any of the prime editor structures, the peptide linker may be any peptide linker described herein or known in the art. In some embodiments, the peptide linker comprises the amino acid sequence, from N terminus to C-terminus: (GGSS)m-(GGS)n, wherein m and n are each any integer between 0 and 50 (SEQ ID NO: 713). In some embodiments, the peptide linker comprises the amino acid sequence, from N terminus to C-terminus: (GGS)n-(GGSS)m (SEQ ID NO: 893), wherein m and n are each any integer between 0 and 50. In some embodiments, m and n are the same. In some embodiments, m and n are different. In some embodiments, the peptide linker comprises the amino acid sequence from N terminus to C-terminus: (GGSS)-(GGS) (SEQ ID NO: 396). In some embodiments, the peptide linker comprises the amino acid sequence from N terminus to C-terminus: (GGSS)2-(GGS) (SEQ ID NO: 395). In some embodiments, the peptide linker comprises the amino acid sequence from N terminus to C-terminus: (GGSS)3-(GGS) (SEQ ID NO: 394). In some embodiments, the peptide linker comprises the amino acid sequence from N terminus to C-terminus: (GGSS)4-(GGS) (SEQ ID NO: 393). In some embodiments, the peptide linker comprises the amino acid sequence from N terminus to C-terminus: (GGSS)5-(GGS) (SEQ ID NO: 392). In some embodiments, the peptide linker comprises the amino acid sequence from N terminus to C-terminus: (GGSS)6-(GGS) (SEQ ID NO: 391). In some embodiments, the peptide linker comprises the amino acid sequence from N terminus to C-terminus: (GGSS)7-(GGS) (SEQ ID NO: 390). In some embodiments, the peptide linker comprises the amino acid sequence from N terminus to C-terminus: (GGSS)8-(GGS) (SEQ ID NO: 389). In some embodiments, the peptide linker comprises the amino acid sequence from N terminus to C-terminus: (GGSS)9-(GGS) (SEQ ID NO: 388). In some embodiments, the peptide linker comprises the amino acid sequence from N terminus to C-terminus: (GGSS)10-(GGS) (SEQ ID NO: 387). In some embodiments, the peptide linker comprises the amino acid sequence from N terminus to C-terminus: (GGSS)11-(GGS) (SEQ ID NO: 386). In some embodiments, the peptide linker comprises the amino acid sequence from N terminus to C-terminus: (GGSS)12-(GGS) (SEQ ID NO: 385). In some embodiments, the peptide linker comprises the amino acid sequence from N terminus to C-terminus: (GGSS)13-(GGS) (SEQ ID NO: 714). In some embodiments, the peptide linker comprises the amino acid sequence from N terminus to C-terminus: (GGSS)14-(GGS) (SEQ ID NO: 715). In some embodiments, the peptide linker comprises the amino acid sequence from N terminus to C-terminus: (GGSS)15-(GGS) (SEQ ID NO: 716). In some embodiments, the peptide linker comprises the amino acid sequence from N terminus to C-terminus: (GGSS)-(GGS)2 (SEQ ID NO: 717). In some embodiments, the peptide linker comprises the amino acid sequence from N terminus to C-terminus: (GGSS)-(GGS)3 (SEQ ID NO: 718). In some embodiments, the peptide linker comprises the amino acid sequence from N terminus to C-terminus: (GGSS)-(GGS)4 (SEQ ID NO: 719). In some embodiments, the peptide linker comprises the amino acid sequence from N terminus to C-terminus: (GGSS)-(GGS)5 (SEQ ID NO: 720). In some embodiments, the peptide linker comprises the amino acid sequence from N terminus to C-terminus: (GGSS)-(GGS)6 (SEQ ID NO: 721). In some embodiments, the peptide linker comprises the amino acid sequence (GGSS)-(GGS)7 (SEQ ID NO: 722). In some embodiments, the peptide linker comprises the amino acid sequence from N terminus to C-terminus: (GGSS)-(GGS)8 (SEQ ID NO: 723). In some embodiments, the peptide linker comprises the amino acid sequence (GGSS)-(GGS)9 (SEQ ID NO: 724). In some embodiments, the peptide linker comprises the amino acid sequence from N terminus to C-terminus: (GGSS)-(GGS)10 (SEQ ID NO: 725). In some embodiments, the peptide linker comprises the amino acid sequence from N terminus to C-terminus: (GGSS)-(GGS)11 (SEQ ID NO: 726). In some embodiments, the peptide linker comprises the amino acid sequence from N terminus to C-terminus: (GGSS)-(GGS)12 (SEQ ID NO: 727). In some embodiments, the peptide linker comprises the amino acid sequence from N terminus to C-terminus: (GGSS)-(GGS)13 (SEQ ID NO: 728). In some embodiments, the peptide linker comprises the amino acid sequence from N terminus to C-terminus: (GGSS)-(GGS)14 (SEQ ID NO: 729). In some embodiments, the peptide linker comprises the amino acid sequence from N terminus to C-terminus: (GGSS)-(GGS)15 (SEQ ID NO: 730).

[0304] In some embodiments, the peptide linker comprises the amino acid sequence from N terminus to C-terminus: (GGSS)2-(GGS)2 (SEQ ID NO: 731). In some embodiments, the peptide linker comprises the amino acid sequence from N terminus to C-terminus: (GGSS)3-(GGS)3 (SEQ ID NO: 732). In some embodiments, the peptide linker comprises the amino acid sequence from N terminus to C-terminus: (GGSS)4-(GGS)4 (SEQ ID NO: 733). In some embodiments, the peptide linker comprises the amino acid sequence from N terminus to C-terminus: (GGSS)5-(GGS)5 (SEQ ID NO: 734). In some embodiments, the peptide linker comprises the amino acid sequence from N terminus to C-terminus: (GGSS)6-(GGS)6 (SEQ ID NO: 735). In some embodiments, the peptide linker comprises the amino acid sequence from N terminus to C-terminus: (GGSS)7-(GGS)7 (SEQ ID NO: 736). In some embodiments, the peptide linker comprises the amino acid sequence from N terminus to C-terminus: (GGSS)8-(GGS)8 (SEQ ID NO: 737). In some embodiments, the peptide linker comprises the amino acid sequence from N terminus to C-terminus: (GGSS)9-(GGS)9 (SEQ ID NO: 738). In some embodiments, the peptide linker comprises the amino acid sequence from N terminus to C-terminus: (GGSS)10-(GGS)10 (SEQ ID NO: 739). In some embodiments, the peptide linker comprises the amino acid sequence from N terminus to C-terminus: (GGSS)11-(GGS)11 (SEQ ID NO: 740). In some embodiments, the peptide linker comprises the amino acid sequence from N terminus to C-terminus: (GGSS)12-(GGS)12 (SEQ ID NO: 741). In some embodiments, the peptide linker comprises the amino acid sequence from N terminus to C-terminus: (GGSS)13-(GGS)13 (SEQ ID NO: 742). In some embodiments, the peptide linker comprises the amino acid sequence from N terminus to C-terminus: (GGSS)14-(GGS)14 (SEQ ID NO: 743). In some embodiments, the peptide linker comprises the amino acid sequence from N terminus to C-terminus: (GGSS)15-(GGS)15 (SEQ ID NO: 744).

[0305] In some embodiments, the peptide linker comprises a (GGSS (SEQ ID NO: 648)) motif. In some embodiments, the peptide linker comprises an XTEN motif comprising the sequence SGSETPGTSESATPES (SEQ ID NO: 295). In some embodiments, the peptide linker comprises two or more (GGSS (SEQ ID NO: 648)) motifs. In some embodiments, the peptide linker comprises an XTEN motif and a (GGSS (SEQ ID NO: 648)) motif. In some embodiments, the peptide linker comprises one or more XTEN motifs and two or more (GGSS) motifs (SEQ ID NO: 659). In some embodiments, the peptide linker comprises two more XTEN motifs and two or more (GGSS) motifs (SEQ ID NO: 659). In some embodiments, the one or more or two or more XTEN motifs are at the N terminus of the peptide linker. In some embodiments, the one or more or two or more XTEN motifs are at the N terminus of the peptide linker. In some embodiments, the one or more or two or more (GGSS) motifs (SEQ ID NO: 659) are at the N terminus of the peptide linker. In some embodiments, the one or more or two or more (GGSS) motifs (SEQ ID NO: 659) are at the N terminus of the peptide linker. In some embodiments, the peptide linker comprises one or more XTEN motifs flanked by a (GGSS (SEQ ID NO: 648)) motif at each end. In some embodiments, the peptide linker comprises one or more XTEN motifs flanked by two or more (GGSS (SEQ ID NO: 648)) motifs at each end.

[0306] In some embodiments, the peptide linker comprises the sequence, from N-terminus to C-terminus: (GGSS)n-(XTEN)m-(GGSS)w, wherein n, m, w are each any integer between 0 and 50. In some embodiments, m, n, and w are the same, or two of m, n, and w are the same. In some embodiments, m, n, and w are each different from each other. In some embodiments, the peptide linker comprises the sequence from N-terminus to C-terminus: (GGSS)-(XTEN)-(GGSS). In some embodiments, the peptide linker comprises the sequence from N-terminus to C-terminus: (GGSS)2-(XTEN)-(GGSS). In some embodiments, the peptide linker comprises the sequence from N-terminus to C-terminus: (GGSS)-(XTEN)2-(GGSS). In some embodiments, the peptide linker comprises the sequence from N-terminus to C-terminus: (GGSS)-(XTEN)-(GGSS)2. In some embodiments, the peptide linker comprises the sequence from N-terminus to C-terminus: (GGSS)2-(XTEN)2-(GGSS). In some embodiments, the peptide linker comprises the sequence from N-terminus to C-terminus: (GGSS)2-(XTEN)-(GGSS)2. In some embodiments, the peptide linker comprises the sequence from N-terminus to C-terminus: (GGSS)-(XTEN)2-(GGSS)2. In some embodiments, the peptide linker comprises the sequence from N-terminus to C-terminus: (GGSS)2-(XTEN)2-(GGSS)2. In some embodiments, the peptide linker comprises the sequence from N-terminus to C-terminus: (GGSS)3-(XTEN)-(GGSS). In some embodiments, the peptide linker comprises the sequence from N-terminus to C-terminus: (GGSS)3-(XTEN)2-(GGSS). In some embodiments, the peptide linker comprises the sequence from N-terminus to C-terminus: (GGSS)3-(XTEN)-(GGSS)2. In some embodiments, the peptide linker comprises the sequence from N-terminus to C-terminus: (GGSS)1-(XTEN)3-(GGSS)2. In some embodiments, the peptide linker comprises the sequence from N-terminus to C-terminus: (GGSS)-(XTEN)3-(GGSS). In some embodiments, the peptide linker comprises the sequence from N-terminus to C-terminus: (GGSS)2-(XTEN)3-(GGSS). In some embodiments, the peptide linker comprises the sequence from N-terminus to C-terminus: (GGSS)-(XTEN)3-(GGSS)2. In some embodiments, the peptide linker comprises the sequence from N-terminus to C-terminus: (GGSS)2-(XTEN)3-(GGSS)2. In some embodiments, the peptide linker comprises the sequence from N-terminus to C-terminus: (GGSS)-(XTEN)-(GGSS)3. In some embodiments, the peptide linker comprises the sequence from N-terminus to C-terminus: (GGSS)3-(XTEN)3-(GGSS). In some embodiments, the peptide linker comprises the sequence from N-terminus to C-terminus: (GGSS)3-(XTEN)-(GGSS)3. In some embodiments, the peptide linker comprises the sequence from N-terminus to C-terminus: (GGSS)-(XTEN)3-(GGSS)3. In some embodiments, the peptide linker comprises the sequence from N-terminus to C-terminus: (GGSS)3-(XTEN)3-(GGSS)3. In some embodiments, the peptide linker comprises the sequence from N-terminus to C-terminus: (GGSS)4-(XTEN)-(GGSS). In some embodiments, the peptide linker comprises the sequence from N-terminus to C-terminus: (GGSS)-(XTEN)4-(GGSS). In some embodiments, the peptide linker comprises the sequence from N-terminus to C-terminus: (GGSS)-(XTEN)-(GGSS)4. In some embodiments, the peptide linker comprises the sequence from N-terminus to C-terminus: (GGSS)4-(XTEN)4-(GGSS). In some embodiments, the peptide linker comprises the sequence from N-terminus to C-terminus: (GGSS)4-(XTEN)-(GGSS)4. In some embodiments, the peptide linker comprises the sequence from N-terminus to C-terminus: (GGSS)-(XTEN)4-(GGSS)4. In some embodiments, the peptide linker comprises the sequence from N-terminus to C-terminus: (GGSS)4-(XTEN)4-(GGSS)4. In some embodiments, the peptide linker comprises the sequence from N-terminus to C-terminus: (GGSS)5-(XTEN)-(GGSS). In some embodiments, the peptide linker comprises the sequence from N-terminus to C-terminus: (GGSS)-(XTEN)5-(GGSS). In some embodiments, the peptide linker comprises the sequence from N-terminus to C-terminus: (GGSS)-(XTEN)-(GGSS)5. In some embodiments, the peptide linker comprises the sequence from N-terminus to C-terminus: (GGSS)5-(XTEN)5-(GGSS). In some embodiments, the peptide linker comprises the sequence from N-terminus to C-terminus: (GGSS)5-(XTEN)-(GGSS)5. In some embodiments, the peptide linker comprises the sequence from N-terminus to C-terminus: (GGSS)-(XTEN)5-(GGSS)5. In some embodiments, the peptide linker comprises the sequence from N-terminus to C-terminus: (GGSS)5-(XTEN)5-(GGSS)5. In some embodiments, the peptide linker comprises the sequence from N-terminus to C-terminus: (GGSS)6-(XTEN)-(GGSS). In some embodiments, the peptide linker comprises the sequence from N-terminus to C-terminus: (GGSS)-(XTEN)6-(GGSS). In some embodiments, the peptide linker comprises the sequence from N-terminus to C-terminus: (GGSS)-(XTEN)-(GGSS)6. In some embodiments, the peptide linker comprises the sequence from N-terminus to C-terminus: (GGSS)6-(XTEN)6-(GGSS). In some embodiments, the peptide linker comprises the sequence from N-terminus to C-terminus: (GGSS)6-(XTEN)-(GGSS)6. In some embodiments, the peptide linker comprises the sequence from N-terminus to C-terminus: (GGSS)-(XTEN)6-(GGSS)6. In some embodiments, the peptide linker comprises the sequence from N-terminus to C-terminus: (GGSS)6-(XTEN)6-(GGSS)6. In some embodiments, the peptide linker comprises the sequence from N-terminus to C-terminus: (GGSS)7-(XTEN)-(GGSS). In some embodiments, the peptide linker comprises the sequence from N-terminus to C-terminus: (GGSS)-(XTEN)7-(GGSS). In some embodiments, the peptide linker comprises the sequence from N-terminus to C-terminus: (GGSS)-(XTEN)-(GGSS)7. In some embodiments, the peptide linker comprises the sequence from N-terminus to C-terminus: (GGSS)7-(XTEN)7-(GGSS). In some embodiments, the peptide linker comprises the sequence from N-terminus to C-terminus: (GGSS)7-(XTEN)-(GGSS)7. In some embodiments, the peptide linker comprises the sequence from N-terminus to C-terminus: (GGSS)-(XTEN)7-(GGSS)7. In some embodiments, the peptide linker comprises the sequence from N-terminus to C-terminus: (GGSS)7-(XTEN)7-(GGSS)7. In some embodiments, the peptide linker comprises the sequence from N-terminus to C-terminus: (GGSS)8-(XTEN)-(GGSS). In some embodiments, the peptide linker comprises the sequence from N-terminus to C-terminus: (GGSS)-(XTEN)8-(GGSS). In some embodiments, the peptide linker comprises the sequence from N-terminus to C-terminus: (GGSS)-(XTEN)-(GGSS)8. In some embodiments, the peptide linker comprises the sequence from N-terminus to C-terminus: (GGSS)8-(XTEN)8-(GGSS). In some embodiments, the peptide linker comprises the sequence from N-terminus to C-terminus: (GGSS)8-(XTEN)-(GGSS)8. In some embodiments, the peptide linker comprises the sequence from N-terminus to C-terminus: (GGSS)-(XTEN)8-(GGSS)8. In some embodiments, the peptide linker comprises the sequence from N-terminus to C-terminus: (GGSS)8-(XTEN)8-(GGSS)8. In some embodiments, the peptide linker comprises the sequence from N-terminus to C-terminus: (GGSS)9-(XTEN)-(GGSS). In some embodiments, the peptide linker comprises the sequence from N-terminus to C-terminus: (GGSS)-(XTEN)9-(GGSS). In some embodiments, the peptide linker comprises the sequence from N-terminus to C-terminus: (GGSS)-(XTEN)-(GGSS)9. In some embodiments, the peptide linker comprises the sequence from N-terminus to C-terminus: (GGSS)9-(XTEN)9-(GGSS). In some embodiments, the peptide linker comprises the sequence from N-terminus to C-terminus: (GGSS)9-(XTEN)-(GGSS)9. In some embodiments, the peptide linker comprises the sequence from N-terminus to C-terminus: (GGSS)-(XTEN)9-(GGSS)9. In some embodiments, the peptide linker comprises the sequence from N-terminus to C-terminus: (GGSS)9-(XTEN)9-(GGSS)9. In some embodiments, the peptide linker comprises the sequence from N-terminus to C-terminus: (GGSS)10-(XTEN)-(GGSS). In some embodiments, the peptide linker comprises the sequence from N-terminus to C-terminus: (GGSS)-(XTEN)10-(GGSS). In some embodiments, the peptide linker comprises the sequence from N-terminus to C-terminus: (GGSS)-(XTEN)-(GGSS)10. In some embodiments, the peptide linker comprises the sequence from N-terminus to C-terminus: (GGSS)10-(XTEN)10-(GGSS). In some embodiments, the peptide linker comprises the sequence from N-terminus to C-terminus: (GGSS)10-(XTEN)-(GGSS)10. In some embodiments, the peptide linker comprises the sequence from N-terminus to C-terminus: (GGSS)-(XTEN)10-(GGSS)10. In some embodiments, the peptide linker comprises the sequence from N-terminus to C-terminus: (GGSS)10-(XTEN)10-(GGSS)10.

[0307] In some embodiments, the peptide linker comprises the sequence from N-terminus to C-terminus: (GGSS)-(XTEN). In some embodiments, the peptide linker comprises the sequence from N-terminus to C-terminus: (GGSS)2-(XTEN). In some embodiments, the peptide linker comprises the sequence from N-terminus to C-terminus: (GGSS)2-(XTEN)2. In some embodiments, the peptide linker comprises the sequence from N-terminus to C-terminus: (GGSS)3-(XTEN). In some embodiments, the peptide linker comprises the sequence from N-terminus to C-terminus: (GGSS)3-(XTEN)2. In some embodiments, the peptide linker comprises the sequence from N-terminus to C-terminus: (GGSS)3-(XTEN)3. In some embodiments, the peptide linker comprises the sequence from N-terminus to C-terminus: (GGSS)4-(XTEN). In some embodiments, the peptide linker comprises the sequence from N-terminus to C-terminus: (GGSS)4-(XTEN)2. In some embodiments, the peptide linker comprises the sequence from N-terminus to C-terminus: (GGSS)4-(XTEN)3. In some embodiments, the peptide linker comprises the sequence from N-terminus to C-terminus: (GGSS)4-(XTEN)4. In some embodiments, the peptide linker comprises the sequence from N-terminus to C-terminus: (GGSS)5-(XTEN). In some embodiments, the peptide linker comprises the sequence from N-terminus to C-terminus: (GGSS)5-(XTEN)2. In some embodiments, the peptide linker comprises the sequence from N-terminus to C-terminus: (GGSS)5-(XTEN)3. In some embodiments, the peptide linker comprises the sequence from N-terminus to C-terminus: (GGSS)5-(XTEN)4. In some embodiments, the peptide linker comprises the sequence from N-terminus to C-terminus: (GGSS)5-(XTEN)5. In some embodiments, the peptide linker comprises the sequence from N-terminus to C-terminus: (GGSS)6-(XTEN). In some embodiments, the peptide linker comprises the sequence from N-terminus to C-terminus: (GGSS)6-(XTEN)2. In some embodiments, the peptide linker comprises the sequence from N-terminus to C-terminus: (GGSS)6-(XTEN)3. In some embodiments, the peptide linker comprises the sequence from N-terminus to C-terminus: (GGSS)6-(XTEN)4. In some embodiments, the peptide linker comprises the sequence from N-terminus to C-terminus: (GGSS)6-(XTEN)5. In some embodiments, the peptide linker comprises the sequence from N-terminus to C-terminus: (GGSS)7-(XTEN). In some embodiments, the peptide linker comprises the sequence from N-terminus to C-terminus: (GGSS)7-(XTEN)2. In some embodiments, the peptide linker comprises the sequence from N-terminus to C-terminus: (GGSS)7-(XTEN)3. In some embodiments, the peptide linker comprises the sequence from N-terminus to C-terminus: (GGSS)7-(XTEN)4. In some embodiments, the peptide linker comprises the sequence from N-terminus to C-terminus: (GGSS)7-(XTEN)5. In some embodiments, the peptide linker comprises the sequence from N-terminus to C-terminus: (GGSS)8-(XTEN). In some embodiments, the peptide linker comprises the sequence from N-terminus to C-terminus: (GGSS)8-(XTEN)2. In some embodiments, the peptide linker comprises the sequence from N-terminus to C-terminus: (GGSS)8-(XTEN)3. In some embodiments, the peptide linker comprises the sequence from N-terminus to C-terminus: (GGSS)8-(XTEN)4. In some embodiments, the peptide linker comprises the sequence from N-terminus to C-terminus: (GGSS)8-(XTEN)5. In some embodiments, the peptide linker comprises the sequence from N-terminus to C-terminus: (GGSS)9-(XTEN). In some embodiments, the peptide linker comprises the sequence from N-terminus to C-terminus: (GGSS)9-(XTEN)2. In some embodiments, the peptide linker comprises the sequence from N-terminus to C-terminus: (GGSS)9-(XTEN)3. In some embodiments, the peptide linker comprises the sequence from N-terminus to C-terminus: (GGSS)9-(XTEN)4. In some embodiments, the peptide linker comprises the sequence from N-terminus to C-terminus: (GGSS)9-(XTEN)5. In some embodiments, the peptide linker comprises the sequence from N-terminus to C-terminus: (GGSS)10-(XTEN). In some embodiments, the peptide linker comprises the sequence from N-terminus to C-terminus: (GGSS)10-(XTEN)2. In some embodiments, the peptide linker comprises the sequence from N-terminus to C-terminus: (GGSS)10-(XTEN)3. In some embodiments, the peptide linker comprises the sequence from N-terminus to C-terminus: (GGSS)10-(XTEN)4. In some embodiments, the peptide linker comprises the sequence from N-terminus to C-terminus: (GGSS)10-(XTEN)5.

[0308] In some embodiments, the peptide linker comprises the sequence from N-terminus to C-terminus: (XTEN)-(GGSS). In some embodiments, the peptide linker comprises the sequence from N-terminus to C-terminus: (XTEN)-(GGSS)2. In some embodiments, the peptide linker comprises the sequence from N-terminus to C-terminus: (XTEN)2-(GGSS)2. In some embodiments, the peptide linker comprises the sequence from N-terminus to C-terminus: (XTEN)-(GGSS)3. In some embodiments, the peptide linker comprises the sequence from N-terminus to C-terminus: (XTEN)2-(GGSS)3. In some embodiments, the peptide linker comprises the sequence from N-terminus to C-terminus: (XTEN)3-(GGSS)3. In some embodiments, the peptide linker comprises the sequence from N-terminus to C-terminus: (XTEN)-(GGSS)4. In some embodiments, the peptide linker comprises the sequence from N-terminus to C-terminus: (XTEN)2-(GGSS)4. In some embodiments, the peptide linker comprises the sequence from N-terminus to C-terminus: (XTEN)3-(GGSS)4. In some embodiments, the peptide linker comprises the sequence from N-terminus to C-terminus: (XTEN)4-(GGSS)4. In some embodiments, the peptide linker comprises the sequence from N-terminus to C-terminus: (XTEN)-(GGSS)5. In some embodiments, the peptide linker comprises the sequence from N-terminus to C-terminus: (XTEN)2-(GGSS)5. In some embodiments, the peptide linker comprises the sequence from N-terminus to C-terminus: (XTEN)3-(GGSS)5. In some embodiments, the peptide linker comprises the sequence from N-terminus to C-terminus: (XTEN)4-(GGSS)5. In some embodiments, the peptide linker comprises the sequence from N-terminus to C-terminus: (XTEN)5-(GGSS)5. In some embodiments, the peptide linker comprises the sequence from N-terminus to C-terminus: (XTEN)-(GGSS)6. In some embodiments, the peptide linker comprises the sequence from N-terminus to C-terminus: (XTEN)2-(GGSS)6. In some embodiments, the peptide linker comprises the sequence from N-terminus to C-terminus: (XTEN)3-(GGSS)6. In some embodiments, the peptide linker comprises the sequence from N-terminus to C-terminus: (XTEN)4-(GGSS)6. In some embodiments, the peptide linker comprises the sequence from N-terminus to C-terminus: (XTEN)5-(GGSS)6. In some embodiments, the peptide linker comprises the sequence from N-terminus to C-terminus: (XTEN)-(GGSS)7. In some embodiments, the peptide linker comprises the sequence from N-terminus to C-terminus: (XTEN)2-(GGSS)7. In some embodiments, the peptide linker comprises the sequence from N-terminus to C-terminus: (XTEN)3-(GGSS)7. In some embodiments, the peptide linker comprises the sequence from N-terminus to C-terminus: (XTEN)4-(GGSS)7. In some embodiments, the peptide linker comprises the sequence from N-terminus to C-terminus: (XTEN)5-(GGSS)7. In some embodiments, the peptide linker comprises the sequence from N-terminus to C-terminus: (XTEN)-(GGSS)8. In some embodiments, the peptide linker comprises the sequence from N-terminus to C-terminus: (XTEN)2-(GGSS)8. In some embodiments, the peptide linker comprises the sequence from N-terminus to C-terminus: (XTEN)3-(GGSS)8. In some embodiments, the peptide linker comprises the sequence from N-terminus to C-terminus: (XTEN)4-(GGSS)8. In some embodiments, the peptide linker comprises the sequence from N-terminus to C-terminus: (XTEN)5-(GGSS)8. In some embodiments, the peptide linker comprises the sequence from N-terminus to C-terminus: (XTEN)-(GGSS)9. In some embodiments, the peptide linker comprises the sequence from N-terminus to C-terminus: (XTEN)2-(GGSS)9. In some embodiments, the peptide linker comprises the sequence from N-terminus to C-terminus: (XTEN)3-(GGSS)9. In some embodiments, the peptide linker comprises the sequence from N-terminus to C-terminus: (XTEN)4-(GGSS)9. In some embodiments, the peptide linker comprises the sequence from N-terminus to C-terminus: (XTEN)5-(GGSS)9. In some embodiments, the peptide linker comprises the sequence from N-terminus to C-terminus: (XTEN)-(GGSS)10-. In some embodiments, the peptide linker comprises the sequence from N-terminus to C-terminus: (XTEN)2-(GGSS)10. In some embodiments, the peptide linker comprises the sequence from N-terminus to C-terminus: (XTEN)3-(GGSS)10. In some embodiments, the peptide linker comprises the sequence from N-terminus to C-terminus: (XTEN)4-(GGSS)10. In some embodiments, the peptide linker comprises the sequence from N-terminus to C-terminus: (XTEN)5-(GGSS)10.

[0309] In some embodiments, the peptide linker comprises the sequence (GGSS)n, wherein n is any integer between 0 and 50 (SEQ ID NO: 843). In some embodiments, the peptide linker comprises the sequence (GGSS)2 (SEQ ID NO: 659). In some embodiments, the peptide linker comprises the sequence (GGSS)3 (SEQ ID NO: 660). In some embodiments, the peptide linker comprises the sequence (GGSS)4 (SEQ ID NO: 661). In some embodiments, the peptide linker comprises the sequence (GGSS)5 (SEQ ID NO: 662). In some embodiments, the peptide linker comprises the sequence (GGSS)6 (SEQ ID NO: 663). In some embodiments, the peptide linker comprises the sequence (GGSS)7 (SEQ ID NO: 664). In some embodiments, the peptide linker comprises the sequence (GGSS)8 (SEQ ID NO: 665). In some embodiments, the peptide linker comprises the sequence (GGSS)9 (SEQ ID NO: 666). In some embodiments, the peptide linker comprises the sequence (GGSS)10 (SEQ ID NO: 667). In some embodiments, the peptide linker comprises the sequence (GGSS)11 (SEQ ID NO: 668). In some embodiments, the peptide linker comprises the sequence (GGSS)12 (SEQ ID NO: 669). In some embodiments, the peptide linker comprises the sequence (GGSS)13 (SEQ ID NO: 670). In some embodiments, the peptide linker comprises the sequence (GGSS)14 (SEQ ID NO: 671). In some embodiments, the peptide linker comprises the sequence (GGSS)15 (SEQ ID NO: 672). In some embodiments, the peptide linker comprises the sequence (GGSS)16 (SEQ ID NO: 673). In some embodiments, the peptide linker comprises the sequence (GGSS)17 (SEQ ID NO: 674). In some embodiments, the peptide linker comprises the sequence (GGSS)18 (SEQ ID NO: 675). In some embodiments, the peptide linker comprises the sequence (GGSS)19 (SEQ ID NO: 676). In some embodiments, the peptide linker comprises the sequence (GGSS)20 (SEQ ID NO: 677).

[0310] In some embodiments, the peptide linker comprises a GGSS motif (SEQ ID NO: 648), an XTEN motif, and a GGS motif (SEQ ID NO: 287). In some embodiments, the peptide linker comprises the sequence, from N-terminus to C-terminus: (GGSS)n-(XTEN)m-(GGS)w, wherein n, m, w are each any integer between 0 and 50. In some embodiments, n, m, and w are the same integer. In some embodiments, n, m, and w are each different from each other. In some embodiments, the peptide linker comprises the sequence, from N-terminus to C-terminus: (GGSS)n-(XTEN)m-(GGSS)x-(GGS)w, wherein n, m, w are each any integer between 0 and 50. In some embodiments, n, m, x, and w are the same integer. In some embodiments, n, m, x, and w are each different from each other. In some embodiments, the peptide linker comprises the sequence, from N-terminus to C-terminus: (GGSS)-(XTEN)-(GGS). In some embodiments, the peptide linker comprises the sequence, from N-terminus to C-terminus: (GGSS)2-(XTEN)-(GGS). In some embodiments, the peptide linker comprises the sequence, from N-terminus to C-terminus: (GGSS)2-(XTEN)2-(GGS). In some embodiments, the peptide linker comprises the sequence, from N-terminus to C-terminus: (GGSS)-(XTEN)2-(GGS). In some embodiments, the peptide linker comprises the sequence, from N-terminus to C-terminus: (GGSS)-(XTEN)2-(GGS)2. In some embodiments, the peptide linker comprises the sequence, from N-terminus to C-terminus: (GGSS)-(XTEN)-(GGS)2. In some embodiments, the peptide linker comprises the sequence, from N-terminus to C-terminus: (GGSS)2-(XTEN)2-(GGS)2. In some embodiments, the peptide linker comprises the sequence, from N-terminus to C-terminus: (GGSS)3-(XTEN)-(GGS). In some embodiments, the peptide linker comprises the sequence, from N-terminus to C-terminus: (GGSS)3-(XTEN)3-(GGS). In some embodiments, the peptide linker comprises the sequence, from N-terminus to C-terminus: (GGSS)-(XTEN)3-(GGS). In some embodiments, the peptide linker comprises the sequence, from N-terminus to C-terminus: (GGSS)-(XTEN)3-(GGS)3. In some embodiments, the peptide linker comprises the sequence, from N-terminus to C-terminus: (GGSS)-(XTEN)-(GGS)3. In some embodiments, the peptide linker comprises the sequence, from N-terminus to C-terminus: (GGSS)3-(XTEN)3-(GGS)3. In some embodiments, the peptide linker comprises the sequence, from N-terminus to C-terminus: (GGSS)4-(XTEN)-(GGS). In some embodiments, the peptide linker comprises the sequence, from N-terminus to C-terminus: (GGSS)4-(XTEN)4-(GGS). In some embodiments, the peptide linker comprises the sequence, from N-terminus to C-terminus: (GGSS)-(XTEN)4-(GGS). In some embodiments, the peptide linker comprises the sequence, from N-terminus to C-terminus: (GGSS)-(XTEN)4-(GGS)4. In some embodiments, the peptide linker comprises the sequence, from N-terminus to C-terminus: (GGSS)-(XTEN)-(GGS)4. In some embodiments, the peptide linker comprises the sequence, from N-terminus to C-terminus: (GGSS)4-(XTEN)4-(GGS)4. In some embodiments, the peptide linker comprises the sequence, from N-terminus to C-terminus: (GGSS)5-(XTEN)-(GGS). In some embodiments, the peptide linker comprises the sequence, from N-terminus to C-terminus: (GGSS)5-(XTEN)5-(GGS). In some embodiments, the peptide linker comprises the sequence, from N-terminus to C-terminus: (GGSS)-(XTEN)5-(GGS). In some embodiments, the peptide linker comprises the sequence, from N-terminus to C-terminus: (GGSS)-(XTEN)5-(GGS)5. In some embodiments, the peptide linker comprises the sequence, from N-terminus to C-terminus: (GGSS)-(XTEN)-(GGS)5. In some embodiments, the peptide linker comprises the sequence, from N-terminus to C-terminus: (GGSS)5-(XTEN)5-(GGS)5.

[0311] In some embodiments, the peptide linker comprises the sequence, from N-terminus to C-terminus: (GGSS)-(XTEN)-(GGSS)-(GGS). In some embodiments, the peptide linker comprises the sequence, from N-terminus to C-terminus: (GGSS)2-(XTEN)-(GGSS)-(GGS). In some embodiments, the peptide linker comprises the sequence, from N-terminus to C-terminus: (GGSS)-(XTEN)2-(GGSS)-(GGS). In some embodiments, the peptide linker comprises the sequence, from N-terminus to C-terminus: (GGSS)-(XTEN)-(GGSS)2-(GGS). In some embodiments, the peptide linker comprises the sequence, from N-terminus to C-terminus: (GGSS)-(XTEN)-(GGSS)-(GGS)2. In some embodiments, the peptide linker comprises the sequence, from N-terminus to C-terminus: (GGSS)2-(XTEN)2-(GGSS)-(GGS). In some embodiments, the peptide linker comprises the sequence, from N-terminus to C-terminus: (GGSS)2-(XTEN)2-(GGSS)2-(GGS). In some embodiments, the peptide linker comprises the sequence, from N-terminus to C-terminus: (GGSS)2-(XTEN)2-(GGSS)2-(GGS)2. In some embodiments, the peptide linker comprises the sequence, from N-terminus to C-terminus: (GGSS)3-(XTEN)-(GGSS)-(GGS). In some embodiments, the peptide linker comprises the sequence, from N-terminus to C-terminus: (GGSS)-(XTEN)3-(GGSS)-(GGS). In some embodiments, the peptide linker comprises the sequence, from N-terminus to C-terminus: (GGSS)-(XTEN)-(GGSS)3-(GGS). In some embodiments, the peptide linker comprises the sequence, from N-terminus to C-terminus: (GGSS)-(XTEN)-(GGSS)-(GGS)3. In some embodiments, the peptide linker comprises the sequence, from N-terminus to C-terminus: (GGSS)3-(XTEN)3-(GGSS)-(GGS). In some embodiments, the peptide linker comprises the sequence, from N-terminus to C-terminus: (GGSS)3-(XTEN)3-(GGSS)3-(GGS). In some embodiments, the peptide linker comprises the sequence, from N-terminus to C-terminus: (GGSS)3-(XTEN)3-(GGSS)3-(GGS)3. In some embodiments, the peptide linker comprises the sequence, from N-terminus to C-terminus: (GGSS)4-(XTEN)-(GGSS)-(GGS). In some embodiments, the peptide linker comprises the sequence, from N-terminus to C-terminus: (GGSS)-(XTEN)4-(GGSS)-(GGS). In some embodiments, the peptide linker comprises the sequence, from N-terminus to C-terminus: (GGSS)-(XTEN)-(GGSS)4-(GGS). In some embodiments, the peptide linker comprises the sequence, from N-terminus to C-terminus: (GGSS)-(XTEN)-(GGSS)-(GGS)4. In some embodiments, the peptide linker comprises the sequence, from N-terminus to C-terminus: (GGSS)4-(XTEN)4-(GGSS)-(GGS). In some embodiments, the peptide linker comprises the sequence, from N-terminus to C-terminus: (GGSS)4-(XTEN)4-(GGSS)4-(GGS). In some embodiments, the peptide linker comprises the sequence, from N-terminus to C-terminus: (GGSS)4-(XTEN)4-(GGSS)4-(GGS)4. In some embodiments, the peptide linker comprises the sequence, from N-terminus to C-terminus: (GGSS)5-(XTEN)-(GGSS)-(GGS). In some embodiments, the peptide linker comprises the sequence, from N-terminus to C-terminus: (GGSS)-(XTEN)5-(GGSS)-(GGS). In some embodiments, the peptide linker comprises the sequence, from N-terminus to C-terminus: (GGSS)-(XTEN)-(GGSS)5-(GGS). In some embodiments, the peptide linker comprises the sequence, from N-terminus to C-terminus: (GGSS)-(XTEN)-(GGSS)-(GGS)5. In some embodiments, the peptide linker comprises the sequence, from N-terminus to C-terminus: (GGSS)5-(XTEN)5-(GGSS)-(GGS). In some embodiments, the peptide linker comprises the sequence, from N-terminus to C-terminus: (GGSS)5-(XTEN)5-(GGSS)5-(GGS). In some embodiments, the peptide linker comprises the sequence, from N-terminus to C-terminus: (GGSS)5-(XTEN)5-(GGSS)5-(GGS)5.

[0312] In some embodiments, the peptide linker comprises a (EAAAK (SEQ ID NO: 657)) motif. In some embodiments, the peptide linker comprises two or more (EAAAK (SEQ ID NO: 657)) motifs. In some embodiments, the peptide linker comprises an XTEN motif and a (EAAAK (SEQ ID NO: 657)) motif. In some embodiments, the peptide linker comprises one or more XTEN motifs and two or more (EAAAK) motifs (SEQ ID NO: 649). In some embodiments, the peptide linker comprises two more XTEN motifs and two or more (EAAAK) motifs (SEQ ID NO: 649). In some embodiments, the one or more or two or more XTEN motifs are at the N terminus of the peptide linker. In some embodiments, the one or more or two or more XTEN motifs are at the N terminus of the peptide linker. In some embodiments, the one or more or two or more (EAAAK) motifs (SEQ ID NO: 649) are at the N terminus of the peptide linker. In some embodiments, the one or more or two or more (EAAAK) motifs (SEQ ID NO: 649) are at the N terminus of the peptide linker. In some embodiments, the peptide linker comprises one or more XTEN motifs flanked by a (EAAAK (SEQ ID NO: 657)) motif at each end. In some embodiments, the peptide linker comprises one or more XTEN motifs flanked by two or more (EAAAK) motifs (SEQ ID NO: 649) at each end.

[0313] In some embodiments, the peptide linker comprises the sequence, from N-terminus to C-terminus: (EAAAK)n-(XTEN)m-(EAAAK)w, wherein n, m, w are each any integer between 0 and 50. In some embodiments, m, n, and w are the same, or two of m, n, and w are the same. In some embodiments, m, n, and w are each different from each other. In some embodiments, the peptide linker comprises the sequence from N-terminus to C-terminus: (EAAAK)-(XTEN)-(EAAAK). In some embodiments, the peptide linker comprises the sequence from N-terminus to C-terminus: (EAAAK)2-(XTEN)-(EAAAK). In some embodiments, the peptide linker comprises the sequence from N-terminus to C-terminus: (EAAAK)-(XTEN)2-(EAAAK). In some embodiments, the peptide linker comprises the sequence from N-terminus to C-terminus: (EAAAK)-(XTEN)-(EAAAK)2. In some embodiments, the peptide linker comprises the sequence from N-terminus to C-terminus: (EAAAK)2-(XTEN)2-(EAAAK). In some embodiments, the peptide linker comprises the sequence from N-terminus to C-terminus: (EAAAK)2-(XTEN)-(EAAAK)2. In some embodiments, the peptide linker comprises the sequence from N-terminus to C-terminus: (EAAAK)-(XTEN)2-(EAAAK)2. In some embodiments, the peptide linker comprises the sequence from N-terminus to C-terminus: (EAAAK)2-(XTEN)2-(EAAAK)2. In some embodiments, the peptide linker comprises the sequence from N-terminus to C-terminus: (EAAAK)3-(XTEN)-(EAAAK). In some embodiments, the peptide linker comprises the sequence from N-terminus to C-terminus: (EAAAK)3-(XTEN)2-(EAAAK). In some embodiments, the peptide linker comprises the sequence from N-terminus to C-terminus: (EAAAK)3-(XTEN)-(EAAAK)2. In some embodiments, the peptide linker comprises the sequence from N-terminus to C-terminus: (EAAAK)1-(XTEN)3-(EAAAK)2. In some embodiments, the peptide linker comprises the sequence from N-terminus to C-terminus: (EAAAK)-(XTEN)3-(EAAAK). In some embodiments, the peptide linker comprises the sequence from N-terminus to C-terminus: (EAAAK)2-(XTEN)3-(EAAAK). In some embodiments, the peptide linker comprises the sequence from N-terminus to C-terminus: (EAAAK)-(XTEN)3-(EAAAK)2. In some embodiments, the peptide linker comprises the sequence from N-terminus to C-terminus: (EAAAK)2-(XTEN)3-(EAAAK)2. In some embodiments, the peptide linker comprises the sequence from N-terminus to C-terminus: (EAAAK)-(XTEN)-(EAAAK)3. In some embodiments, the peptide linker comprises the sequence from N-terminus to C-terminus: (EAAAK)3-(XTEN)3-(EAAAK). In some embodiments, the peptide linker comprises the sequence from N-terminus to C-terminus: (EAAAK)3-(XTEN)-(EAAAK)3. In some embodiments, the peptide linker comprises the sequence from N-terminus to C-terminus: (EAAAK)-(XTEN)3-(EAAAK)3. In some embodiments, the peptide linker comprises the sequence from N-terminus to C-terminus: (EAAAK)3-(XTEN)3-(EAAAK)3. In some embodiments, the peptide linker comprises the sequence from N-terminus to C-terminus: (EAAAK)4-(XTEN)-(EAAAK). In some embodiments, the peptide linker comprises the sequence from N-terminus to C-terminus: (EAAAK)-(XTEN)4-(EAAAK). In some embodiments, the peptide linker comprises the sequence from N-terminus to C-terminus: (EAAAK)-(XTEN)-(EAAAK)4. In some embodiments, the peptide linker comprises the sequence from N-terminus to C-terminus: (EAAAK)4-(XTEN)4-(EAAAK). In some embodiments, the peptide linker comprises the sequence from N-terminus to C-terminus: (EAAAK)4-(XTEN)-(EAAAK)4. In some embodiments, the peptide linker comprises the sequence from N-terminus to C-terminus: (EAAAK)-(XTEN)4-(EAAAK)4. In some embodiments, the peptide linker comprises the sequence from N-terminus to C-terminus: (EAAAK)4-(XTEN)4-(EAAAK)4. In some embodiments, the peptide linker comprises the sequence from N-terminus to C-terminus: (EAAAK)5-(XTEN)-(EAAAK). In some embodiments, the peptide linker comprises the sequence from N-terminus to C-terminus: (EAAAK)-(XTEN)5-(EAAAK). In some embodiments, the peptide linker comprises the sequence from N-terminus to C-terminus: (EAAAK)-(XTEN)-(EAAAK)5. In some embodiments, the peptide linker comprises the sequence from N-terminus to C-terminus: (EAAAK)5-(XTEN)5-(EAAAK). In some embodiments, the peptide linker comprises the sequence from N-terminus to C-terminus: (EAAAK)5-(XTEN)-(EAAAK)5. In some embodiments, the peptide linker comprises the sequence from N-terminus to C-terminus: (EAAAK)-(XTEN)5-(EAAAK)5. In some embodiments, the peptide linker comprises the sequence from N-terminus to C-terminus: (EAAAK)5-(XTEN)5-(EAAAK)5. In some embodiments, the peptide linker comprises the sequence from N-terminus to C-terminus: (EAAAK)6-(XTEN)-(EAAAK). In some embodiments, the peptide linker comprises the sequence from N-terminus to C-terminus: (EAAAK)-(XTEN)6-(EAAAK). In some embodiments, the peptide linker comprises the sequence from N-terminus to C-terminus: (EAAAK)-(XTEN)-(EAAAK)6. In some embodiments, the peptide linker comprises the sequence from N-terminus to C-terminus: (EAAAK)6-(XTEN)6-(EAAAK). In some embodiments, the peptide linker comprises the sequence from N-terminus to C-terminus: (EAAAK)6-(XTEN)-(EAAAK)6. In some embodiments, the peptide linker comprises the sequence from N-terminus to C-terminus: (EAAAK)-(XTEN)6-(EAAAK)6. In some embodiments, the peptide linker comprises the sequence from N-terminus to C-terminus: (EAAAK)6-(XTEN)6-(EAAAK)6. In some embodiments, the peptide linker comprises the sequence from N-terminus to C-terminus: (EAAAK)7-(XTEN)-(EAAAK). In some embodiments, the peptide linker comprises the sequence from N-terminus to C-terminus: (EAAAK)-(XTEN)7-(EAAAK). In some embodiments, the peptide linker comprises the sequence from N-terminus to C-terminus: (EAAAK)-(XTEN)-(EAAAK)7. In some embodiments, the peptide linker comprises the sequence from N-terminus to C-terminus: (EAAAK)7-(XTEN)7-(EAAAK). In some embodiments, the peptide linker comprises the sequence from N-terminus to C-terminus: (EAAAK)7-(XTEN)-(EAAAK)7. In some embodiments, the peptide linker comprises the sequence from N-terminus to C-terminus: (EAAAK)-(XTEN)7-(EAAAK)7. In some embodiments, the peptide linker comprises the sequence from N-terminus to C-terminus: (EAAAK)7-(XTEN)7-(EAAAK)7. In some embodiments, the peptide linker comprises the sequence from N-terminus to C-terminus: (EAAAK)8-(XTEN)-(EAAAK). In some embodiments, the peptide linker comprises the sequence from N-terminus to C-terminus: (EAAAK)-(XTEN)8-(EAAAK). In some embodiments, the peptide linker comprises the sequence from N-terminus to C-terminus: (EAAAK)-(XTEN)-(EAAAK)8. In some embodiments, the peptide linker comprises the sequence from N-terminus to C-terminus: (EAAAK)8-(XTEN)8-(EAAAK). In some embodiments, the peptide linker comprises the sequence from N-terminus to C-terminus: (EAAAK)8-(XTEN)-(EAAAK)8. In some embodiments, the peptide linker comprises the sequence from N-terminus to C-terminus: (EAAAK)-(XTEN)8-(EAAAK)8. In some embodiments, the peptide linker comprises the sequence from N-terminus to C-terminus: (EAAAK)8-(XTEN)8-(EAAAK)8. In some embodiments, the peptide linker comprises the sequence from N-terminus to C-terminus: (EAAAK)9-(XTEN)-(EAAAK). In some embodiments, the peptide linker comprises the sequence from N-terminus to C-terminus: (EAAAK)-(XTEN)9-(EAAAK). In some embodiments, the peptide linker comprises the sequence from N-terminus to C-terminus: (EAAAK)-(XTEN)-(EAAAK)9. In some embodiments, the peptide linker comprises the sequence from N-terminus to C-terminus: (EAAAK)9-(XTEN)9-(EAAAK). In some embodiments, the peptide linker comprises the sequence from N-terminus to C-terminus: (EAAAK)9-(XTEN)-(EAAAK)9. In some embodiments, the peptide linker comprises the sequence from N-terminus to C-terminus: (EAAAK)-(XTEN)9-(EAAAK)9. In some embodiments, the peptide linker comprises the sequence from N-terminus to C-terminus: (EAAAK)9-(XTEN)9-(EAAAK)9. In some embodiments, the peptide linker comprises the sequence from N-terminus to C-terminus: (EAAAK)10-(XTEN)-(EAAAK). In some embodiments, the peptide linker comprises the sequence from N-terminus to C-terminus: (EAAAK)-(XTEN)10-(EAAAK). In some embodiments, the peptide linker comprises the sequence from N-terminus to C-terminus: (EAAAK)-(XTEN)-(EAAAK)10. In some embodiments, the peptide linker comprises the sequence from N-terminus to C-terminus: (EAAAK)10-(XTEN)10-(EAAAK). In some embodiments, the peptide linker comprises the sequence from N-terminus to C-terminus: (EAAAK)10-(XTEN)-(EAAAK)10. In some embodiments, the peptide linker comprises the sequence from N-terminus to C-terminus: (EAAAK)-(XTEN)10-(EAAAK)10. In some embodiments, the peptide linker comprises the sequence from N-terminus to C-terminus: (EAAAK)10-(XTEN)10-(EAAAK)10.

[0314] In some embodiments, the peptide linker comprises the sequence from N-terminus to C-terminus: (EAAAK)-(XTEN). In some embodiments, the peptide linker comprises the sequence from N-terminus to C-terminus: (EAAAK)2-(XTEN). In some embodiments, the peptide linker comprises the sequence from N-terminus to C-terminus: (EAAAK)2-(XTEN)2. In some embodiments, the peptide linker comprises the sequence from N-terminus to C-terminus: (EAAAK)3-(XTEN). In some embodiments, the peptide linker comprises the sequence from N-terminus to C-terminus: (EAAAK)3-(XTEN)2. In some embodiments, the peptide linker comprises the sequence from N-terminus to C-terminus: (EAAAK)3-(XTEN)3. In some embodiments, the peptide linker comprises the sequence from N-terminus to C-terminus: (EAAAK)4-(XTEN). In some embodiments, the peptide linker comprises the sequence from N-terminus to C-terminus: (EAAAK)4-(XTEN)2. In some embodiments, the peptide linker comprises the sequence from N-terminus to C-terminus: (EAAAK)4-(XTEN)3. In some embodiments, the peptide linker comprises the sequence from N-terminus to C-terminus: (EAAAK)4-(XTEN)4. In some embodiments, the peptide linker comprises the sequence from N-terminus to C-terminus: (EAAAK)5-(XTEN). In some embodiments, the peptide linker comprises the sequence from N-terminus to C-terminus: (EAAAK)5-(XTEN)2. In some embodiments, the peptide linker comprises the sequence from N-terminus to C-terminus: (EAAAK)5-(XTEN)3. In some embodiments, the peptide linker comprises the sequence from N-terminus to C-terminus: (EAAAK)5-(XTEN)4. In some embodiments, the peptide linker comprises the sequence from N-terminus to C-terminus: (EAAAK)5-(XTEN)5. In some embodiments, the peptide linker comprises the sequence from N-terminus to C-terminus: (EAAAK)6-(XTEN). In some embodiments, the peptide linker comprises the sequence from N-terminus to C-terminus: (EAAAK)6-(XTEN)2. In some embodiments, the peptide linker comprises the sequence from N-terminus to C-terminus: (EAAAK)6-(XTEN)3. In some embodiments, the peptide linker comprises the sequence from N-terminus to C-terminus: (EAAAK)6-(XTEN)4. In some embodiments, the peptide linker comprises the sequence from N-terminus to C-terminus: (EAAAK)6-(XTEN)5. In some embodiments, the peptide linker comprises the sequence from N-terminus to C-terminus: (EAAAK)7-(XTEN). In some embodiments, the peptide linker comprises the sequence from N-terminus to C-terminus: (EAAAK)7-(XTEN)2. In some embodiments, the peptide linker comprises the sequence from N-terminus to C-terminus: (EAAAK)7-(XTEN)3. In some embodiments, the peptide linker comprises the sequence from N-terminus to C-terminus: (EAAAK)7-(XTEN)4. In some embodiments, the peptide linker comprises the sequence from N-terminus to C-terminus: (EAAAK)7-(XTEN)5. In some embodiments, the peptide linker comprises the sequence from N-terminus to C-terminus: (EAAAK)8-(XTEN). In some embodiments, the peptide linker comprises the sequence from N-terminus to C-terminus: (EAAAK)8-(XTEN)2. In some embodiments, the peptide linker comprises the sequence from N-terminus to C-terminus: (EAAAK)8-(XTEN)3. In some embodiments, the peptide linker comprises the sequence from N-terminus to C-terminus: (EAAAK)8-(XTEN)4. In some embodiments, the peptide linker comprises the sequence from N-terminus to C-terminus: (EAAAK)8-(XTEN)5. In some embodiments, the peptide linker comprises the sequence from N-terminus to C-terminus: (EAAAK)9-(XTEN). In some embodiments, the peptide linker comprises the sequence from N-terminus to C-terminus: (EAAAK)9-(XTEN)2. In some embodiments, the peptide linker comprises the sequence from N-terminus to C-terminus: (EAAAK)9-(XTEN)3. In some embodiments, the peptide linker comprises the sequence from N-terminus to C-terminus: (EAAAK)9-(XTEN)4. In some embodiments, the peptide linker comprises the sequence from N-terminus to C-terminus: (EAAAK)9-(XTEN)5. In some embodiments, the peptide linker comprises the sequence from N-terminus to C-terminus: (EAAAK)10-(XTEN). In some embodiments, the peptide linker comprises the sequence from N-terminus to C-terminus: (EAAAK)10-(XTEN)2. In some embodiments, the peptide linker comprises the sequence from N-terminus to C-terminus: (EAAAK)10-(XTEN)3. In some embodiments, the peptide linker comprises the sequence from N-terminus to C-terminus: (EAAAK)10-(XTEN)4. In some embodiments, the peptide linker comprises the sequence from N-terminus to C-terminus: (EAAAK)10-(XTEN)5.

[0315] In some embodiments, the peptide linker comprises the sequence from N-terminus to C-terminus: (XTEN)-(EAAAK). In some embodiments, the peptide linker comprises the sequence from N-terminus to C-terminus: (XTEN)-(EAAAK)2. In some embodiments, the peptide linker comprises the sequence from N-terminus to C-terminus: (XTEN)2-(EAAAK)2. In some embodiments, the peptide linker comprises the sequence from N-terminus to C-terminus: (XTEN)-(EAAAK)3. In some embodiments, the peptide linker comprises the sequence from N-terminus to C-terminus: (XTEN)2-(EAAAK)3. In some embodiments, the peptide linker comprises the sequence from N-terminus to C-terminus: (XTEN)3-(EAAAK)3. In some embodiments, the peptide linker comprises the sequence from N-terminus to C-terminus: (XTEN)-(EAAAK)4. In some embodiments, the peptide linker comprises the sequence from N-terminus to C-terminus: (XTEN)2-(EAAAK)4. In some embodiments, the peptide linker comprises the sequence from N-terminus to C-terminus: (XTEN)3-(EAAAK)4. In some embodiments, the peptide linker comprises the sequence from N-terminus to C-terminus: (XTEN)4-(EAAAK)4. In some embodiments, the peptide linker comprises the sequence from N-terminus to C-terminus: (XTEN)-(EAAAK)5. In some embodiments, the peptide linker comprises the sequence from N-terminus to C-terminus: (XTEN)2-(EAAAK)5. In some embodiments, the peptide linker comprises the sequence from N-terminus to C-terminus: (XTEN)3-(EAAAK)5. In some embodiments, the peptide linker comprises the sequence from N-terminus to C-terminus: (XTEN)4-(EAAAK)5. In some embodiments, the peptide linker comprises the sequence from N-terminus to C-terminus: (XTEN)5-(EAAAK)5. In some embodiments, the peptide linker comprises the sequence from N-terminus to C-terminus: (XTEN)-(EAAAK)6. In some embodiments, the peptide linker comprises the sequence from N-terminus to C-terminus: (XTEN)2-(EAAAK)6. In some embodiments, the peptide linker comprises the sequence from N-terminus to C-terminus: (XTEN)3-(EAAAK)6. In some embodiments, the peptide linker comprises the sequence from N-terminus to C-terminus: (XTEN)4-(EAAAK)6. In some embodiments, the peptide linker comprises the sequence from N-terminus to C-terminus: (XTEN)5-(EAAAK)6. In some embodiments, the peptide linker comprises the sequence from N-terminus to C-terminus: (XTEN)-(EAAAK)7. In some embodiments, the peptide linker comprises the sequence from N-terminus to C-terminus: (XTEN)2-(EAAAK)7. In some embodiments, the peptide linker comprises the sequence from N-terminus to C-terminus: (XTEN)3-(EAAAK)7. In some embodiments, the peptide linker comprises the sequence from N-terminus to C-terminus: (XTEN)4-(EAAAK)7. In some embodiments, the peptide linker comprises the sequence from N-terminus to C-terminus: (XTEN)5-(EAAAK)7. In some embodiments, the peptide linker comprises the sequence from N-terminus to C-terminus: (XTEN)-(EAAAK)8. In some embodiments, the peptide linker comprises the sequence from N-terminus to C-terminus: (XTEN)2-(EAAAK)8. In some embodiments, the peptide linker comprises the sequence from N-terminus to C-terminus: (XTEN)3-(EAAAK)8. In some embodiments, the peptide linker comprises the sequence from N-terminus to C-terminus: (XTEN)4-(EAAAK)8. In some embodiments, the peptide linker comprises the sequence from N-terminus to C-terminus: (XTEN)5-(EAAAK)8. In some embodiments, the peptide linker comprises the sequence from N-terminus to C-terminus: (XTEN)-(EAAAK)9. In some embodiments, the peptide linker comprises the sequence from N-terminus to C-terminus: (XTEN)2-(EAAAK)9. In some embodiments, the peptide linker comprises the sequence from N-terminus to C-terminus: (XTEN)3-(EAAAK)9. In some embodiments, the peptide linker comprises the sequence from N-terminus to C-terminus: (XTEN)4-(EAAAK)9. In some embodiments, the peptide linker comprises the sequence from N-terminus to C-terminus: (XTEN)5-(EAAAK)9. In some embodiments, the peptide linker comprises the sequence from N-terminus to C-terminus: (XTEN)-(EAAAK)10-. In some embodiments, the peptide linker comprises the sequence from N-terminus to C-terminus: (XTEN)2-(EAAAK)10. In some embodiments, the peptide linker comprises the sequence from N-terminus to C-terminus: (XTEN)3-(EAAAK)10. In some embodiments, the peptide linker comprises the sequence from N-terminus to C-terminus: (XTEN)4-(EAAAK)10. In some embodiments, the peptide linker comprises the sequence from N-terminus to C-terminus: (XTEN)5-(EAAAK)10.

[0316] In some embodiments, the peptide linker comprises the sequence (EAAAK)n, wherein n is any integer between 0 and 50 (SEQ ID NO: 844). In some embodiments, the peptide linker comprises the sequence (EAAAK)2 (SEQ ID NO: 649). In some embodiments, the peptide linker comprises the sequence (EAAAK)3 (SEQ ID NO: 697). In some embodiments, the peptide linker comprises the sequence (EAAAK)4 (SEQ ID NO: 650). In some embodiments, the peptide linker comprises the sequence (EAAAK)5 (SEQ ID NO: 698). In some embodiments, the peptide linker comprises the sequence (EAAAK)6 (SEQ ID NO: 699). In some embodiments, the peptide linker comprises the sequence (EAAAK)7 (SEQ ID NO: 700). In some embodiments, the peptide linker comprises the sequence (EAAAK)8 (SEQ ID NO: 651). In some embodiments, the peptide linker comprises the sequence (EAAAK)9 (SEQ ID NO: 701). In some embodiments, the peptide linker comprises the sequence (EAAAK)10 (SEQ ID NO: 702). In some embodiments, the peptide linker comprises the sequence (EAAAK)11 (SEQ ID NO: 703). In some embodiments, the peptide linker comprises the sequence (EAAAK)12 (SEQ ID NO: 704). In some embodiments, the peptide linker comprises the sequence (EAAAK)13 (SEQ ID NO: 705). In some embodiments, the peptide linker comprises the sequence (EAAAK)14 (SEQ ID NO: 706). In some embodiments, the peptide linker comprises the sequence (EAAAK)15 (SEQ ID NO: 707). In some embodiments, the peptide linker comprises the sequence (EAAAK)16 (SEQ ID NO: 708). In some embodiments, the peptide linker comprises the sequence (EAAAK)17 (SEQ ID NO: 709). In some embodiments, the peptide linker comprises the sequence (EAAAK)18 (SEQ ID NO: 710). In some embodiments, the peptide linker comprises the sequence (EAAAK)19 (SEQ ID NO: 711). In some embodiments, the peptide linker comprises the sequence (EAAAK)20 (SEQ ID NO: 712).

[0317] In some embodiments, the peptide linker comprises the sequence from N-terminus to C-terminus: A-(EAAAK)n-A, wherein n is any integer between 0 and 50 (SEQ ID NO: 845). In some embodiments, the peptide linker comprises the sequence from N-terminus to C-terminus: A-(EAAAK)-A (SEQ ID NO: 846). In some embodiments, the peptide linker comprises the sequence from N-terminus to C-terminus: A-(EAAAK)2-A (SEQ ID NO: 847). In some embodiments, the peptide linker comprises the sequence from N-terminus to C-terminus: A-(EAAAK)3-A (SEQ ID NO: 848). In some embodiments, the peptide linker comprises the sequence from N-terminus to C-terminus: A-(EAAAK)4-A (SEQ ID NO: 849). In some embodiments, the peptide linker comprises the sequence from N-terminus to C-terminus: A-(EAAAK)5-A (SEQ ID NO: 850). In some embodiments, the peptide linker comprises the sequence from N-terminus to C-terminus: A-(EAAAK)6-A (SEQ ID NO: 851). In some embodiments, the peptide linker comprises the sequence from N-terminus to C-terminus: A-(EAAAK)7-A (SEQ ID NO: 852). In some embodiments, the peptide linker comprises the sequence from N-terminus to C-terminus: A-(EAAAK)8-A (SEQ ID NO: 853). In some embodiments, the peptide linker comprises the sequence from N-terminus to C-terminus: A-(EAAAK)9-A (SEQ ID NO: 854). In some embodiments, the peptide linker comprises the sequence from N-terminus to C-terminus: A-(EAAAK)10-A (SEQ ID NO: 855). In some embodiments, the peptide linker comprises the sequence from N-terminus to C-terminus: A-(EAAAK)11-A (SEQ ID NO: 856). In some embodiments, the peptide linker comprises the sequence from N-terminus to C-terminus: A-(EAAAK)12-A (SEQ ID NO: 857). In some embodiments, the peptide linker comprises the sequence from N-terminus to C-terminus: A-(EAAAK)13-A (SEQ ID NO: 858). In some embodiments, the peptide linker comprises the sequence from N-terminus to C-terminus: A-(EAAAK)14-A (SEQ ID NO: 859). In some embodiments, the peptide linker comprises the sequence from N-terminus to C-terminus: A-(EAAAK)15-A (SEQ ID NO: 860). In some embodiments, the peptide linker comprises the sequence from N-terminus to C-terminus: A-(EAAAK)16-A (SEQ ID NO: 861). In some embodiments, the peptide linker comprises the sequence from N-terminus to C-terminus: A-(EAAAK)17-A (SEQ ID NO: 862). In some embodiments, the peptide linker comprises the sequence from N-terminus to C-terminus: A-(EAAAK)18-A (SEQ ID NO: 863). In some embodiments, the peptide linker comprises the sequence from N-terminus to C-terminus: A-(EAAAK)19-A (SEQ ID NO: 864). In some embodiments, the peptide linker comprises the sequence from N-terminus to C-terminus: A-(EAAAK)20-A (SEQ ID NO: 865).

[0318] In some embodiments, the peptide linker comprises the sequence from N-terminus to C-terminus: SGGS-(EAAAK)n-SGGS (SEQ ID NO: 866), wherein n is any integer between 0 and 50. In some embodiments, the peptide linker comprises the sequence from N-terminus to C-terminus: SGGS-(EAAAK)-SGGS (SEQ ID NO: 867). In some embodiments, the peptide linker comprises the sequence from N-terminus to C-terminus: SGGS-(EAAAK)2-SGGS (SEQ ID NO: 311). In some embodiments, the peptide linker comprises the sequence from N-terminus to C-terminus: SGGS-(EAAAK)3-SGGS (SEQ ID NO: 310). In some embodiments, the peptide linker comprises the sequence from N-terminus to C-terminus: SGGS-(EAAAK)4-SGGS (SEQ ID NO: 309). In some embodiments, the peptide linker comprises the sequence from N-terminus to C-terminus: SGGS-(EAAAK)5-SGGS (SEQ ID NO: 868). In some embodiments, the peptide linker comprises the sequence from N-terminus to C-terminus: SGGS-(EAAAK)6-SGGS (SEQ ID NO: 307). In some embodiments, the peptide linker comprises the sequence from N-terminus to C-terminus: SGGS-(EAAAK)7-SGGS (SEQ ID NO: 869). In some embodiments, the peptide linker comprises the sequence from N-terminus to C-terminus: SGGS-(EAAAK)8-SGGS (SEQ ID NO: 306). In some embodiments, the peptide linker comprises the sequence from N-terminus to C-terminus: SGGS-(EAAAK)9-SGGS (SEQ ID NO: 870). In some embodiments, the peptide linker comprises the sequence from N-terminus to C-terminus: SGGS-(EAAAK)10-SGGS (SEQ ID NO: 871). In some embodiments, the peptide linker comprises the sequence from N-terminus to C-terminus: SGGS-(EAAAK)11-SGGS (SEQ ID NO: 872). In some embodiments, the peptide linker comprises the sequence from N-terminus to C-terminus: SGGS-(EAAAK)12-SGGS (SEQ ID NO: 873). In some embodiments, the peptide linker comprises the sequence from N-terminus to C-terminus: SGGS-(EAAAK)13-SGGS (SEQ ID NO: 874). In some embodiments, the peptide linker comprises the sequence from N-terminus to C-terminus: SGGS-(EAAAK)14-SGGS (SEQ ID NO: 875). In some embodiments, the peptide linker comprises the sequence from N-terminus to C-terminus: SGGS-(EAAAK)15-SGGS (SEQ ID NO: 876). In some embodiments, the peptide linker comprises the sequence from N-terminus to C-terminus: SGGS-(EAAAK)16-SGGS (SEQ ID NO: 877). In some embodiments, the peptide linker comprises the sequence from N-terminus to C-terminus: SGGS-(EAAAK)17-SGGS (SEQ ID NO: 878). In some embodiments, the peptide linker comprises the sequence from N-terminus to C-terminus: SGGS-(EAAAK)18-SGGS (SEQ ID NO: 879). In some embodiments, the peptide linker comprises the sequence from N-terminus to C-terminus: SGGS-(EAAAK)19-SGGS (SEQ ID NO: 880). In some embodiments, the peptide linker comprises the sequence from N-terminus to C-terminus: SGGS-(EAAAK)20-SGGS (SEQ ID NO: 881).

[0319] In some embodiments, the peptide linker comprises the sequence, from N-terminus to C-terminus: (GGS)n-(EAAAK)m-(GGS)w, wherein n, m, w are each any integer between 0 and 50 (SEQ ID NO: 747). In some embodiments, m, n, and w are the same, or two of m, n, and w are the same. In some embodiments, m, n, and w are each different from each other. In some embodiments, the peptide linker comprises the sequence, from N-terminus to C-terminus: (GGS)-(EAAAK)-(GGS) (SEQ ID NO: 406). In some embodiments, the peptide linker comprises the sequence, from N-terminus to C-terminus: (GGS)-(EAAAK)2-(GGS) (SEQ ID NO: 405). In some embodiments, the peptide linker comprises the sequence, from N-terminus to C-terminus: (GGS)-(EAAAK)3-(GGS) (SEQ ID NO: 404). In some embodiments, the peptide linker comprises the sequence, from N-terminus to C-terminus: (GGS)-(EAAAK)4-(GGS) (SEQ ID NO: 403). In some embodiments, the peptide linker comprises the sequence, from N-terminus to C-terminus: (GGS)-(EAAAK)5-(GGS) (SEQ ID NO: 402). In some embodiments, the peptide linker comprises the sequence, from N-terminus to C-terminus: (GGS)-(EAAAK)6-(GGS) (SEQ ID NO: 401). In some embodiments, the peptide linker comprises the sequence, from N-terminus to C-terminus: (GGS)-(EAAAK)7-(GGS) (SEQ ID NO: 400). In some embodiments, the peptide linker comprises the sequence, from N-terminus to C-terminus: (GGS)-(EAAAK)8-(GGS) (SEQ ID NO: 399). In some embodiments, the peptide linker comprises the sequence, from N-terminus to C-terminus: (GGS)-(EAAAK)9-(GGS) (SEQ ID NO: 398). In some embodiments, the peptide linker comprises the sequence, from N-terminus to C-terminus: (GGS)-(EAAAK)10-(GGS) (SEQ ID NO: 397). In some embodiments, the peptide linker comprises the sequence, from N-terminus to C-terminus: (GGS)-(EAAAK)11-(GGS) (SEQ ID NO: 748). In some embodiments, the peptide linker comprises the sequence, from N-terminus to C-terminus: (GGS)-(EAAAK)12-(GGS) (SEQ ID NO: 749). In some embodiments, the peptide linker comprises the sequence, from N-terminus to C-terminus: (GGS)-(EAAAK)13-(GGS) (SEQ ID NO: 750). In some embodiments, the peptide linker comprises the sequence, from N-terminus to C-terminus: (GGS)-(EAAAK)14-(GGS) (SEQ ID NO: 751). In some embodiments, the peptide linker comprises the sequence, from N-terminus to C-terminus: (GGS)-(EAAAK)15-(GGS) (SEQ ID NO: 752). In some embodiments, the peptide linker comprises the sequence, from N-terminus to C-terminus: (GGS)2-(EAAAK)-(GGS)2 (SEQ ID NO: 753). In some embodiments, the peptide linker comprises the sequence, from N-terminus to C-terminus: (GGS)2-(EAAAK)2-(GGS)2 (SEQ ID NO: 754). In some embodiments, the peptide linker comprises the sequence, from N-terminus to C-terminus: (GGS)2-(EAAAK)3-(GGS)2 (SEQ ID NO: 755). In some embodiments, the peptide linker comprises the sequence, from N-terminus to C-terminus: (GGS)2-(EAAAK)4-(GGS)2 (SEQ ID NO: 756). In some embodiments, the peptide linker comprises the sequence, from N-terminus to C-terminus: (GGS)2-(EAAAK)5-(GGS)2 (SEQ ID NO: 757). In some embodiments, the peptide linker comprises the sequence, from N-terminus to C-terminus: (GGS)2-(EAAAK)6-(GGS)2 (SEQ ID NO: 758). In some embodiments, the peptide linker comprises the sequence, from N-terminus to C-terminus: (GGS)2-(EAAAK)7-(GGS)2 (SEQ ID NO: 759). In some embodiments, the peptide linker comprises the sequence, from N-terminus to C-terminus: (GGS)2-(EAAAK)8-(GGS)2 (SEQ ID NO: 760). In some embodiments, the peptide linker comprises the sequence, from N-terminus to C-terminus: (GGS)2-(EAAAK)9-(GGS)2 (SEQ ID NO: 761). In some embodiments, the peptide linker comprises the sequence, from N-terminus to C-terminus: (GGS)2-(EAAAK)10-(GGS)2 (SEQ ID NO: 762). In some embodiments, the peptide linker comprises the sequence, from N-terminus to C-terminus: (GGS)2-(EAAAK)11-(GGS)2 (SEQ ID NO: 763). In some embodiments, the peptide linker comprises the sequence, from N-terminus to C-terminus: (GGS)2-(EAAAK)12-(GGS)2 (SEQ ID NO: 764). In some embodiments, the peptide linker comprises the sequence, from N-terminus to C-terminus: (GGS)2-(EAAAK)13-(GGS)2 (SEQ ID NO: 765). In some embodiments, the peptide linker comprises the sequence, from N-terminus to C-terminus: (GGS)2-(EAAAK)14-(GGS)2 (SEQ ID NO: 766). In some embodiments, the peptide linker comprises the sequence, from N-terminus to C-terminus: (GGS)2-(EAAAK)15-(GGS)2 (SEQ ID NO: 767). In some embodiments, the peptide linker comprises the sequence, from N-terminus to C-terminus: (GGSS)n-(XTEN)m-(EAAAK)w, wherein n, m, w are each any integer between 0 and 50. In some embodiments, the peptide linker comprises the sequence, from N-terminus to C-terminus: (GGSS)n-(EAAAK)m-(XTEN)w, wherein n, m, w are each any integer between 0 and 50. In some embodiments, the peptide linker comprises the sequence, from N-terminus to C-terminus: (EAAAK)n-(XTEN)m-(GGSS)w, wherein n, m, w are each any integer between 0 and 50. In some embodiments, the peptide linker comprises the sequence, from N-terminus to C-terminus: (EAAAK)n-(GGSS)m-(XTEN)w, wherein n, m, w are each any integer between 0 and 50. In some embodiments, the peptide linker comprises the sequence, from N-terminus to C-terminus: (XTEN)n-(GGSS)m-(EAAAK)w, wherein n, m, w are each any integer between 0 and 50. In some embodiments, the peptide linker comprises the sequence, from N-terminus to C-terminus: (XTEN)n-(EAAAK)m-(GGSS)w, wherein n, m, w are each any integer between 0 and 50. In some embodiments, m, n, and w are the same, or two of m, n, and w are the same. In some embodiments, m, n, and w are each different from each other.

[0320] In some embodiments, the peptide linker comprises the sequence (PAPA)n, wherein n is any integer between 0 and 50 (SEQ ID NO: 768). In some embodiments, the peptide linker comprises the sequence (PAPA)2 (SEQ ID NO: 769). In some embodiments, the peptide linker comprises the sequence (PAPA)3 (SEQ ID NO: 770). In some embodiments, the peptide linker comprises the sequence (PAPA)4 (SEQ ID NO: 771). In some embodiments, the peptide linker comprises the sequence (PAPA)5 (SEQ ID NO: 772). In some embodiments, the peptide linker comprises the sequence (PAPA)6 (SEQ ID NO: 773). In some embodiments, the peptide linker comprises the sequence (PAPA)7 (SEQ ID NO: 774). In some embodiments, the peptide linker comprises the sequence (PAPA)8 (SEQ ID NO: 775). In some embodiments, the peptide linker comprises the sequence (PAPA)9 (SEQ ID NO: 776). In some embodiments, the peptide linker comprises the sequence (PAPA)10 (SEQ ID NO: 777). In some embodiments, the peptide linker comprises the sequence (PAPA)11 (SEQ ID NO: 778). In some embodiments, the peptide linker comprises the sequence (PAPA)12 (SEQ ID NO: 779). In some embodiments, the peptide linker comprises the sequence (PAPA)13 (SEQ ID NO: 780). In some embodiments, the peptide linker comprises the sequence (PAPA)14 (SEQ ID NO: 781). In some embodiments, the peptide linker comprises the sequence (PAPA)15 (SEQ ID NO: 782). In some embodiments, the peptide linker comprises the sequence (PAPA)16 (SEQ ID NO: 783). In some embodiments, the peptide linker comprises the sequence (PAPA)17 (SEQ ID NO: 784). In some embodiments, the peptide linker comprises the sequence (PAPA)18 (SEQ ID NO: 785). In some embodiments, the peptide linker comprises the sequence (PAPA)19 (SEQ ID NO: 786). In some embodiments, the peptide linker comprises the sequence (PAPA)20 (SEQ ID NO: 787).

[0321] In some embodiments, the peptide linker comprises the sequence, from N-terminus to C-terminus: (GGS)n-(PAPA)m-(GGS)w, wherein n, m, w are each any integer between 0 and 50 (SEQ ID NO: 788). In some embodiments, m, n, and w are the same, or two of m, n, and w are the same. In some embodiments, m, n, and w are each different from each other. In some embodiments, the peptide linker comprises the sequence, from N-terminus to C-terminus: (GGS)-(PAPA)-(GGS) (SEQ ID NO: 789). In some embodiments, the peptide linker comprises the sequence, from N-terminus to C-terminus: (GGS)-(PAPA)2-(GGS) (SEQ ID NO: 790). In some embodiments, the peptide linker comprises the sequence, from N-terminus to C-terminus: (GGS)-(PAPA)3-(GGS) (SEQ ID NO: 791). In some embodiments, the peptide linker comprises the sequence, from N-terminus to C-terminus: (GGS)-(PAPA)4-(GGS) (SEQ ID NO: 792). In some embodiments, the peptide linker comprises the sequence, from N-terminus to C-terminus: (GGS)-(PAPA)5-(GGS) (SEQ ID NO: 793). In some embodiments, the peptide linker comprises the sequence, from N-terminus to C-terminus: (GGS)-(PAPA)6-(GGS) (SEQ ID NO: 794). In some embodiments, the peptide linker comprises the sequence, from N-terminus to C-terminus: (GGS)-(PAPA)7-(GGS) (SEQ ID NO: 795). In some embodiments, the peptide linker comprises the sequence, from N-terminus to C-terminus: (GGS)-(PAPA)8-(GGS) (SEQ ID NO: 796). In some embodiments, the peptide linker comprises the sequence, from N-terminus to C-terminus: (GGS)-(PAPA)9-(GGS) (SEQ ID NO: 797). In some embodiments, the peptide linker comprises the sequence, from N-terminus to C-terminus: (GGS)-(PAPA)10-(GGS) (SEQ ID NO: 798). In some embodiments, the peptide linker comprises the sequence, from N-terminus to C-terminus: (GGS)-(PAPA)11-(GGS) (SEQ ID NO: 799). In some embodiments, the peptide linker comprises the sequence, from N-terminus to C-terminus: (GGS)-(PAPA)12-(GGS) (SEQ ID NO: 800). In some embodiments, the peptide linker comprises the sequence, from N-terminus to C-terminus: (GGS)-(PAPA)13-(GGS) (SEQ ID NO: 801). In some embodiments, the peptide linker comprises the sequence, from N-terminus to C-terminus: (GGS)-(PAPA)14-(GGS) (SEQ ID NO: 802). In some embodiments, the peptide linker comprises the sequence, from N-terminus to C-terminus: (GGS)-(PAPA)15-(GGS) (SEQ ID NO: 803). In some embodiments, the peptide linker comprises the sequence, from N-terminus to C-terminus: (GGS)2-(PAPA)-(GGS)2 (SEQ ID NO: 804). In some embodiments, the peptide linker comprises the sequence, from N-terminus to C-terminus: (GGS)2-(PAPA)2-(GGS)2 (SEQ ID NO: 805). In some embodiments, the peptide linker comprises the sequence, from N-terminus to C-terminus: (GGS)2-(PAPA)3-(GGS)2 (SEQ ID NO: 806). In some embodiments, the peptide linker comprises the sequence, from N-terminus to C-terminus: (GGS)2-(PAPA)4-(GGS)2 (SEQ ID NO: 807). In some embodiments, the peptide linker comprises the sequence, from N-terminus to C-terminus: (GGS)2-(PAPA)5-(GGS)2 (SEQ ID NO: 808). In some embodiments, the peptide linker comprises the sequence, from N-terminus to C-terminus: (GGS)2-(PAPA)6-(GGS)2 (SEQ ID NO: 809). In some embodiments, the peptide linker comprises the sequence, from N-terminus to C-terminus: (GGS)2-(PAPA)7-(GGS)2 (SEQ ID NO: 810). In some embodiments, the peptide linker comprises the sequence, from N-terminus to C-terminus: (GGS)2-(PAPA)8-(GGS)2 (SEQ ID NO: 811). In some embodiments, the peptide linker comprises the sequence, from N-terminus to C-terminus: (GGS)2-(PAPA)9-(GGS)2 (SEQ ID NO: 812). In some embodiments, the peptide linker comprises the sequence, from N-terminus to C-terminus: (GGS)2-(PAPA)10-(GGS)2 (SEQ ID NO: 813). In some embodiments, the peptide linker comprises the sequence, from N-terminus to C-terminus: (GGS)2-(PAPA)11-(GGS)2 (SEQ ID NO: 814). In some embodiments, the peptide linker comprises the sequence, from N-terminus to C-terminus: (GGS)2-(PAPA)12-(GGS)2 (SEQ ID NO: 815). In some embodiments, the peptide linker comprises the sequence, from N-terminus to C-terminus: (GGS)2-(PAPA)13-(GGS)2 (SEQ ID NO: 816). In some embodiments, the peptide linker comprises the sequence, from N-terminus to C-terminus: (GGS)2-(PAPA)14-(GGS)2 (SEQ ID NO: 817). In some embodiments, the peptide linker comprises the sequence, from N-terminus to C-terminus: (GGS)2-(PAPA)15-(GGS)2 (SEQ ID NO: 818).

[0322] In some embodiments, the peptide linker comprises the sequence, from N-terminus to C-terminus: (GGS)n-(PAPA)m-(PSGGS)w, wherein n, m, w are each any integer between 0 and 50 (SEQ ID NO: 819). In some embodiments, m, n, and w are the same, or two of m, n, and w are the same. In some embodiments, m, n, and w are each different from each other. In some embodiments, the peptide linker comprises the sequence, from N-terminus to C-terminus: (GGS)-(PAPA)-(PSGGS) (SEQ ID NO: 820). In some embodiments, the peptide linker comprises the sequence, from N-terminus to C-terminus: (GGS)-(PAPA)2-(PSGGS) (SEQ ID NO: 821). In some embodiments, the peptide linker comprises the sequence, from N-terminus to C-terminus: (GGS)-(PAPA)3-(PSGGS) (SEQ ID NO: 822). In some embodiments, the peptide linker comprises the sequence, from N-terminus to C-terminus: (GGS)-(PAPA)4-(PSGGS) (SEQ ID NO: 823). In some embodiments, the peptide linker comprises the sequence, from N-terminus to C-terminus: (GGS)-(PAPA)5-(PSGGS) (SEQ ID NO: 824). In some embodiments, the peptide linker comprises the sequence, from N-terminus to C-terminus: (GGS)-(PAPA)6-(PSGGS) (SEQ ID NO: 825). In some embodiments, the peptide linker comprises the sequence, from N-terminus to C-terminus: (GGS)-(PAPA)7-(PSGGS) (SEQ ID NO: 826). In some embodiments, the peptide linker comprises the sequence, from N-terminus to C-terminus: (GGS)-(PAPA)8-(PSGGS) (SEQ ID NO: 827). In some embodiments, the peptide linker comprises the sequence, from N-terminus to C-terminus: (GGS)-(PAPA)9-(PSGGS) (SEQ ID NO: 828). In some embodiments, the peptide linker comprises the sequence, from N-terminus to C-terminus: (GGS)-(PAPA)10-(PSGGS) (SEQ ID NO: 829). In some embodiments, the peptide linker comprises the sequence, from N-terminus to C-terminus: (GGS)-(PAPA)11-(PSGGS) (SEQ ID NO: 830). In some embodiments, the peptide linker comprises the sequence, from N-terminus to C-terminus: (GGS)-(PAPA)12-(PSGGS) (SEQ ID NO: 831). In some embodiments, the peptide linker comprises the sequence, from N-terminus to C-terminus: (GGS)-(PAPA)13-(PSGGS) (SEQ ID NO: 832). In some embodiments, the peptide linker comprises the sequence, from N-terminus to C-terminus: (GGS)-(PAPA)14-(PSGGS) (SEQ ID NO: 833). In some embodiments, the peptide linker comprises the sequence, from N-terminus to C-terminus: (GGS)-(PAPA)15-(PSGGS) (SEQ ID NO: 834).

[0323] In some embodiments, the peptide linker comprises a sequence having at least about 80%, 81%, 82%, 83%, 84%, 85%, 86%, 87%, 88%, 80%, 90%, 91%, 92%, 93%, 94%, 95%, 96%, 97%, 98%, 99%, or 100% identity to a sequence selected from the group consisting of SEQ ID Nos 286-411. In some embodiments, the peptide linker comprises a sequence having at least about 80%, 81%, 82%, 83%, 84%, 85%, 86%, 87%, 88%, 80%, 90%, 91%, 92%, 93%, 94%, 95%, 96%, 97%, 98%, 99%, or 100% identity to a sequence selected from the group consisting of SEQ ID Nos 289-311. In some embodiments, the peptide linker comprises a sequence selected from the group consisting of SEQ ID Nos 289-311. In some embodiments, the peptide linker comprises a sequence having at least about 80%, 81%, 82%, 83%, 84%, 85%, 86%, 87%, 88%, 80%, 90%, 91%, 92%, 93%, 94%, 95%, 96%, 97%, 98%, 99%, or 100% identity to SEQ ID Nos 302. In some embodiments, the peptide linker comprises a sequence having at least about 80%, 81%, 82%, 83%, 84%, 85%, 86%, 87%, 88%, 80%, 90%, 91%, 92%, 93%, 94%, 95%, 96%, 97%, 98%, 99%, or 100% identity to SEQ ID 309. In some embodiments, the peptide linker comprises the sequence of SEQ ID No 302. In some embodiments, the peptide linker comprises the sequence of SEQ ID No 309.

### Nuclear Localization Signals

[0324] In some embodiments, a prime editor fusion protein comprises an NLS at the N terminus. In some embodiments, a prime editor fusion protein comprises an NLS at the C terminus. In some embodiments, a prime editor fusion protein comprises a first NLS at the N terminus and a second NLS at the C terminus. In some embodiments the first and second NLS are identical. In some embodiments the first and second NLS are not identical. In some embodiments, a prime editor fusion protein comprises an NLS at the N terminus of the DNA binding domain. In some embodiments, a prime editor fusion protein comprises an NLS at the C terminus of the DNA binding domain. In some embodiments, a prime editor fusion protein comprises an NLS at the N terminus of the DNA polymerase domain. In some embodiments, a prime editor fusion protein comprises a first NLS at the N terminus of the DNA polymerase domain and a second NLS at the C terminus of the DNA binding domain. In some embodiments, a prime editor fusion protein comprises an NLS at the N terminus of the DNA polymerase domain. In some embodiments, a prime editor fusion protein comprises a first NLS at the C terminus of the DNA polymerase domain and a second NLS at the N terminus of the DNA binding domain. In some embodiments, the first and the second NLS are identical. In some embodiments the first and the second NLS are not identical. In some embodiments, a prime editor fusion protein comprises an NLS at the C terminus of the DNA polymerase domain. In some embodiments, a prime editor fusion protein comprises two or more NLS. In some embodiments, a prime editor fusion protein comprises two or more NLS at the N terminus and/or C terminus. In some embodiments, a prime editor fusion protein comprises an NLS between DNA binding domain and DNA polymerase domain.

[0325] In some embodiments, a prime editor fusion protein comprises an NLS at the N terminus, wherein the NLS comprises the sequence MKRTADGSEFESPKKKRKV (SEQ ID NO: 9). In some embodiments, the prime editor fusion protein comprises an NLS at the N terminus, wherein the NLS comprises the sequence (KRTADGSEFESPKKKRKV)n, wherein n is any integer between 0 and 50, between 1 and 50, between 2 and 40, between 2 and 25, between 2 and 10, or between 2 and 5 (SEQ ID NO: 835). In some embodiments, a prime editor fusion protein comprises an NLS at the N terminus, wherein the NLS comprises the sequence MPAAKRVKLDGGKRTADGSEFESPKKKRKV (SEQ ID NO:15). In some embodiments, the prime editor fusion protein comprises an NLS at the N terminus, wherein the NLS comprises the sequence (PAAKRVKLDGGKRTADGSEFESPKKKRKV)n, wherein n is any integer between 0 and 50, between 1 and 50, between 2 and 40, between 2 and 25, between 2 and 10, or between 2 and 5 (SEQ ID NO: 837).

[0326] In some embodiments, a prime editor fusion protein comprises an NLS at the C terminus, wherein the NLS comprises the sequence KRTADGSEFESPKKKRKV (SEQ ID NO: 8). In some embodiments, the prime editor fusion protein comprises an NLS at the C terminus, wherein the NLS comprises the sequence (KRTADGSEFESPKKKRKV)n, wherein n is any integer between 0 and 50, between 1 and 50, between 2 and 40, between 2 and 25, between 2 and 10, or between 2 and 5 (SEQ ID NO: 835).

[0327] In some embodiments, a prime editor fusion protein comprises an NLS at the C terminus, wherein the NLS comprises the sequence PKKKRKV (SEQ ID NO: 12). In some embodiments, the prime editor fusion protein comprises an NLS at the C terminus, wherein the NLS comprises the sequence (PKKKRKV)n, wherein n is any integer between 0 and 50, between 1 and 50, between 2 and 40, between 2 and 25, between 2 and 10, or between 2 and 5 (SEQ ID NO: 838).

[0328] In some embodiments, a prime editor fusion protein comprises an NLS at the C terminus, wherein the NLS comprises the sequence KRTADSQHSTPPKTKRKV-EFES-PKKKRKV (SEQ ID NO: 13). In some embodiments, the prime editor fusion protein comprises an NLS at the C terminus, wherein the NLS comprises the sequence (KRTADSQHSTPPKTKRKV-EFES-PKKKRKV)n, wherein n is any integer between 0 and 50, between 1 and 50, between 2 and 40, between 2 and 25, between 2 and 10, or between 2 and 5 (SEQ ID NO: 839).

[0329] In some embodiments, a prime editor fusion protein comprises an NLS at the C terminus, wherein the NLS comprises the sequence KRTADSQHSTPPKTKRKV-EFE-PKKKRKV (SEQ ID NO: 14). In some embodiments, the prime editor fusion protein comprises an NLS at the C terminus, wherein the NLS comprises the sequence (KRTADSQHSTPPKTKRKV-EFE-PKKKRKV)n, wherein n is any integer between 0 and 50, between 1 and 50, between 2 and 40, between 2 and 25, between 2 and 10, or between 2 and 5 (SEQ ID NO: 840).

[0330] In some embodiments, a prime editor fusion protein comprises one or more NLSs at the N terminus and one or more NLSs at the C terminus, wherein the NLSs at the N terminus comprises the sequence KRTADGSEFESPKKKRKV (SEQ ID NO: 8), and wherein the NLSs at the C terminus comprises the sequence KRTADGSEFESPKKKRKV (SEQ ID NO: 8).

[0331] In some embodiments, a prime editor fusion protein comprises one or more NLSs at the N terminus and one or more NLSs at the C terminus, wherein the NLSs at the N terminus comprises the sequence KRTADGSEFESPKKKRKV (SEQ ID NO: 8), and wherein the NLSs at the C terminus comprises the sequence PKKKRKV (SEQ ID NO: 12).

[0332] In some embodiments, a prime editor fusion protein comprises one or more NLSs at the N terminus and one or more NLSs at the C terminus, wherein the NLSs at the N terminus comprises the sequence KRTADGSEFESPKKKRKV (SEQ ID NO: 8), and wherein the NLSs at the C terminus comprises the sequence KRTADSQHSTPPKTKRKV-EFES-PKKKRKV (SEQ ID NO: 13).

[0333] In some embodiments, a prime editor fusion protein comprises one or more NLSs at the N terminus and one or more NLSs at the C terminus, wherein the NLSs at the N terminus comprises the sequence KRTADGSEFESPKKKRKV (SEQ ID NO: 8), and wherein the NLSs at the C terminus comprises the sequence KRTADSQHSTPPKTKRKV-EFE-PKKKRKV (SEQ ID NO: 14).

[0334] In some embodiments, a prime editor fusion protein comprises one or more NLSs at the N terminus and one or more NLSs at the C terminus, wherein the NLSs at the N terminus comprises the sequence PAAKRVKLDGGKRTADGSEFESPKKKRKV (SEQ ID NO: 10), and wherein the NLSs at the C terminus comprises the sequence PAAKRVKLDGGKRTADGSEFESPKKKRKV (SEQ ID NO: 10).

[0335] In some embodiments, a prime editor fusion protein comprises one or more NLSs at the N terminus and one or more NLSs at the C terminus, wherein the NLSs at the N terminus comprises the sequence PAAKRVKLDGGKRTADGSEFESPKKKRKV (SEQ ID NO: 10), and wherein the NLSs at the C terminus comprises the sequence PKKKRKV (SEQ ID NO: 12).

[0336] In some embodiments, a prime editor fusion protein comprises one or more NLSs at the N terminus and one or more NLSs at the C terminus, wherein the NLSs at the N terminus comprises the sequence PAAKRVKLDGGKRTADGSEFESPKKKRKV (SEQ ID NO: 10), and wherein the NLSs at the C terminus comprises the sequence KRTADSQHSTPPKTKRKV-EFES-PKKKRKV (SEQ ID NO: 13).

[0337] In some embodiments, a prime editor fusion protein comprises one or more NLSs at the N terminus and one or more NLSs at the C terminus, wherein the NLSs at the N terminus comprises the sequence PAAKRVKLDGGKRTADGSEFESPKKKRKV (SEQ ID NO: 10), and wherein the NLSs at the C terminus comprises the sequence KRTADSQHSTPPKTKRKV-EFE-PKKKRKV (SEQ ID NO: 14).

[0338] In some embodiments, a prime editor fusion protein comprises the structure, from N-terminus to C-terminus: BPNLS-DNA binding domain-(GGSS)2-XTEN-(GGSS2)-Reverse transcriptase-BPNLS. In some embodiments, a prime editor fusion protein comprises the structure, from N-terminus to C-terminus: SV40BPNLS-DNA binding domain-(SGGS)8-REVERSE TRANSCRIPTASE-SV40BPNLS1. In some embodiments, a prime editor fusion protein comprises the structure, from N-terminus to C-terminus: SV40BPNLS-DNA binding domain-(SGGS)8-REVERSE TRANSCRIPTASE(G504X)-SV40BPNLS1.

[0339] In some embodiments, a prime editor fusion protein comprises the structure, from N-terminus to C-terminus: BPNLS-DNA binding domain-(GGSS)2-XTEN-(GGSS2)-Reverse transcriptase-BPNLS. In some embodiments, a prime editor fusion protein comprises the structure, from N-terminus to C-terminus: SV40BPNLS-DNA binding domain-SGGS-(EAAAK)4-SGGS-REVERSE TRANSCRIPTASE-SV40BPNLS1. In some embodiments, a prime editor fusion protein comprises the structure, from N-terminus to C-terminus: SV40BPNLS-DNA binding domain-SGGS-(EAAAK)4-SGGS-REVERSE TRANSCRIPTASE(G504X)-SV40BPNLS1.

[0340] In some embodiments, a prime editor fusion protein comprises the structure, from N-terminus to C-terminus: c-MycNLS-BPNLS-DNA binding domain-(SGGS)8-REVERSE TRANSCRIPTASE-BPNLS-NLS. In some embodiments, a prime editor fusion protein comprises the structure, from N-terminus to C-terminus: C-mycNLS-BPNLS-DNA binding domain-(SGGS)8-REVERSE TRANSCRIPTASE-BPNLS-SV40NLS. In some embodiments, a prime editor fusion protein comprises the structure, from N-terminus to C-terminus: BPNLS-DNA binding domain-(EAAAK)8-REVERSE TRANSCRIPTASE-BPNLS. In some embodiments, a prime editor fusion protein comprises the structure, from N-terminus to C-terminus: BPNLS-DNA binding domain-(GGSS)2-XTEN-(GGSS)2-REVERSE TRANSCRIPTASE-NLS. In some embodiments, a prime editor fusion protein comprises the structure, from N-terminus to C-terminus: BPNLS-DNA binding domain-(GGSS)2-XTEN-(GGSS)2-REVERSE TRANSCRIPTASE-SV40NLS. In some embodiments, a prime editor fusion protein comprises the structure, from N-terminus to C-terminus: C-mycNLS-BPNLS-DNA binding domain-(SGGS)8-REVERSE TRANSCRIPTASE(G504X)-BPNLS-NLS. In some embodiments, a prime editor fusion protein comprises the structure, from N-terminus to C-terminus: C-mycNLS-BPNLS-DNA binding domain-(SGGS)8-REVERSE TRANSCRIPTASE-BPNLS-SV40NLS. In some embodiments, a prime editor fusion protein comprises the structure, from N-terminus to C-terminus: C-mycNLS-BPNLS-DNA binding domain-(SGGS)8-REVERSE TRANSCRIPTASE(G504X)-BPNLS-NLS.

[0341] In some embodiments, a prime editor fusion protein comprises an NLS at the N terminus. In some embodiments, a prime editor fusion protein comprises an NLS at the C terminus. In some embodiments, a prime editor fusion protein comprises a first NLS at the N terminus and a second NLS at the C terminus. In some embodiments the first and second NLS are identical. In some embodiments the first and second NLS are not identical. In some embodiments, a prime editor fusion protein comprises an NLS at the N terminus of the DNA binding domain. In some embodiments, a prime editor fusion protein comprises an NLS at the C terminus of the DNA binding domain. In some embodiments, a prime editor fusion protein comprises an NLS at the N terminus of the DNA polymerase domain. In some embodiments, a prime editor fusion protein comprises a first NLS at the N terminus of the DNA polymerase domain and a second NLS at the C terminus of the DNA binding domain. In some embodiments, a prime editor fusion protein comprises an NLS at the N terminus of the DNA polymerase domain. In some embodiments, a prime editor fusion protein comprises a first NLS at the C terminus of the DNA polymerase domain and a second NLS at the N terminus of the DNA binding domain. In some embodiments, the first and the second NLS are identical. In some embodiments the first and the second NLS are not identical. In some embodiments, a prime editor fusion protein comprises an NLS at the C terminus of the DNA polymerase domain. In some embodiments, a prime editor fusion protein comprises two or more NLS. In some embodiments, a prime editor fusion protein comprises two or more NLS at the N terminus and/or C terminus. In some embodiments, a prime editor fusion protein comprises an NLS between DNA binding domain and DNA polymerase domain. In some embodiments, NLS or the two or more NLSs comprise a bipartite NLS (BPNLS). In some embodiments, the BPNLS is a bipartite SV40 NLS or a bipartite Xenopus nucleoplasmin NLS. In some embodiments, the BPNLS comprises an amino acid sequence selected from the group consisting of SEQ ID Nos 8-23.

[0342] In some embodiments, a prime editor fusion protein, a polypeptide component of a prime editor, or a polynucleotide encoding the prime editor fusion protein or polypeptide component, may be split into an N-terminal half and a C-terminal half or polypeptides that encode the N-terminal half and the C terminal half, and provided to a target DNA in a cell separately. For example, in certain embodiments, a prime editor fusion protein may be split into a N-terminal and a C-terminal half for separate delivery in AAV vectors, and subsequently translated and colocalized in a target cell to reform the complete polypeptide or prime editor protein. In such cases, separate halves of a protein or a fusion protein may each comprise a split-intein to facilitate colocalization and reformation of the complete protein or fusion protein by the mechanism of intein facilitated trans splicing. In some embodiments, a prime editor comprises a N-terminal half fused to an intein-N, and a C-terminal half fused to an intein-C, or polynucleotides or vectors (e.g. AAV vectors) encoding each thereof. When delivered and/or expressed in a target cell, the intein-N and the intein-C can be excised via protein trans-splicing, resulting in a complete prime editor fusion protein in the target cell.

[0343] In some embodiments, a prime editor is a fusion protein that comprises the amino acid sequence having at least 50%, at least 55%, at least 60%, at least 65%, at least 70%, at least 75%, at least 80%, at least 85%, at least 90%, at least 95%, or at least 99% identity to the amino acid sequence of any one of SEQ ID NOs: 77, 78, 85, 86, 93, 96, 99, 104, 105, 110, 111, 116,117, 122, 125, 128, 131, 134, 137, 140, 143, 146, 149, 152, 155, 158, 161, 164, 167, 170, 173, 176, 179, 182, 185, 188, 191, 194, 197, 200, 203, 206, 209, 212, 215, 218, 221, 224, 227, and 230. In some embodiments, a prime editor comprises a fusion protein that comprises the amino acid sequence of SEQ ID NO: 34, 35, 77, 78, 85, 86, 620, 622, 624, 625, or 647. In some embodiments, a prime editor comprises a fusion protein that comprises a DNA binding domain comprising the amino acid sequence of any one of SEQ ID Nos 2, 6, 7, or 596-613. In some embodiments, a prime editor comprises a fusion protein that comprises a reverse transcriptase comprising the amino acid sequence of any one of SEQ ID Nos: 1, 4, 5, 36, 45, 54, 63, or 623. In some embodiments, a prime editor is a fusion protein that comprises the amino acid sequence having at least 50%, at least 55%, at least 60%, at least 65%, at least 70%, at least 75%, at least 80%, at least 85%, at least 90%, at least 95%, at least 99%, or 100% identity to the amino acid sequence of SEQ ID No: 77. In some embodiments, a prime editor is a fusion protein that comprises the amino acid sequence having at least 50%, at least 55%, at least 60%, at least 65%, at least 70%, at least 75%, at least 80%, at least 85%, at least 90%, at least 95%, at least 99%, or 100% identity to the amino acid sequence of SEQ ID No: 78. In some embodiments, a prime editor is a fusion protein that comprises the amino acid sequence having at least 50%, at least 55%, at least 60%, at least 65%, at least 70%, at least 75%, at least 80%, at least 85%, at least 90%, at least 95%, at least 99%, or 100% identity to the amino acid sequence of SEQ ID No: 85. In some embodiments, a prime editor is a fusion protein that comprises the amino acid sequence having at least 50%, at least 55%, at least 60%, at least 65%, at least 70%, at least 75%, at least 80%, at least 85%, at least 90%, at least 95%, at least 99%, or 100% identity to the amino acid sequence of SEQ ID No: 86. In some embodiments, a prime editor is a fusion protein that is encoded by a polynucleotide comprising a nucleotide sequence as set forth in any of SEQ ID NO: 79-82, 87-90, 94-95, 97-98, 100-103, 106-109, 112-115, 118-121, 123, 124, 126, 127, 129, 130, 132, 133, 135, 136, 138, 139, 144, 145, 147, 148, 150, 151, 153, 154, 156, 157, 159, 160, 162, 163, 165, 166, 168, 169, 171, 172, 174, 175, 177, 178, 180, 181, 183, 184, 186, 187, 189, 190, 192, 193, 195, 196, 198, 199, 201, 202, 204, 205, 207, 208, 210, 211, 213, 214, 216, 217, 219, 220, 222, 223, 225, 226, 228, 229, 231, 232, 233, 234, 241, 242, 274-285, and 592-595. In some embodiments, a prime editor is a fusion protein that is encoded by a polynucleotide comprising a nucleotide sequence as set forth in SEQ ID NO: 79-82, 87-90, 274-285, or 592-595.

### Prime Editing Guide RNAs (PEgRNAs)

[0344] The term “prime editing guide RNA”, or “PEgRNA”, refers to a guide polynucleotide that comprises one or more intended nucleotide edits for incorporation into a double stranded target polynucleotide, e.g., double stranded target DNA. In some embodiments, the PEgRNA associates with and directs a prime editor to incorporate the one or more intended nucleotide edits into the double stranded target DNA, e.g., a target gene via prime editing. “Nucleotide edit” or “intended nucleotide edit” refers to a specified deletion of one or more nucleotides at one specific position, insertion of one or more nucleotides at one specific position, substitution of a single nucleotide, or other alterations at one specific position to be incorporated into the sequence of the double stranded target DNA, e.g., a target gene. Intended nucleotide edit may refer to the edit on the editing template as compared to the sequence on the target strand of the double stranded target DNA, e.g., a target gene, or may refer to the edit encoded by the editing template on the newly synthesized single stranded DNA that replaces the editing target sequence, as compared to the editing target sequence. In some embodiments, a PEgRNA comprises a spacer sequence that is complementary or substantially complementary to a search target sequence on a target strand of the double stranded target DNA, e.g., a target gene. In some embodiments, the PEgRNA comprises a gRNA core that associates with a DNA binding domain, e.g., a CRISPR-Cas protein domain, of a prime editor. In some embodiments, the PEgRNA further comprises an extended nucleotide sequence comprising one or more intended nucleotide edits compared to the endogenous sequence of the double stranded target DNA, e.g., a target gene, wherein the extended nucleotide sequence may be referred to as an extension arm.

[0345] In certain embodiments, the extension arm comprises a primer binding site sequence (PBS) that can initiate target-primed DNA synthesis. In some embodiments, the PBS is complementary or substantially complementary to a free 3′ end on the edit strand of the double stranded target DNA, e.g., a target gene at a nick site generated by the prime editor. In some embodiments, the extension arm further comprises an editing template that comprises one or more intended nucleotide edits to be incorporated in the double stranded target DNA, e.g., a target gene by prime editing. In some embodiments, the editing template is a template for an RNA-dependent DNA polymerase domain or polypeptide of the prime editor, for example, a reverse transcriptase domain. The reverse transcriptase editing template may also be referred to herein as an RT template, or RTT. In some embodiments, the editing template comprises partial complementarity to an editing target sequence in the double stranded target DNA, e.g., a target gene. In some embodiments, the editing template comprises substantial or partial complementarity to the editing target sequence except at the position of the intended nucleotide edits to be incorporated into the double stranded target DNA, e.g., a target gene. An exemplary architecture of a PEgRNA including its components is as demonstrated in FIG. 2.

[0346] In some embodiments, a PEgRNA includes only RNA nucleotides and forms an RNA polynucleotide. In some embodiments, a PEgRNA is a chimeric polynucleotide that includes both RNA and DNA nucleotides. For example, a PEgRNA can include DNA in the spacer sequence, the gRNA core, or the extension arm. In some embodiments, a PEgRNA comprises DNA in the spacer sequence. In some embodiments, the entire spacer sequence of a PEgRNA is a DNA sequence. In some embodiments, the PEgRNA comprises DNA in the gRNA core, for example, in a stem region of the gRNA core. In some embodiments, the PEgRNA comprises DNA in the extension arm, for example, in the editing template. An editing template that comprises a DNA sequence may serve as a DNA synthesis template for a DNA polymerase in a prime editor, for example, a DNA-dependent DNA polymerase. Accordingly, the PEgRNA may be a chimeric polynucleotide that comprises RNA in the spacer, gRNA core, and/or the PBS sequences and DNA in the editing template.

[0347] Components of a PEgRNA may be arranged in a modular fashion. In some embodiments, the spacer and the extension arm comprising a primer binding site sequence (PBS) and an editing template, e.g., a reverse transcriptase template (RTT), can be interchangeably located in the 5′ portion of the PEgRNA, the 3′ portion of the PEgRNA, or in the middle of the gRNA core. In some embodiments, a PEgRNA comprises a PBS and an editing template sequence in 5′ to 3′ order. In some embodiments, the gRNA core of a PEgRNA of this disclosure may be located in between a spacer and an extension arm of the PEgRNA. In some embodiments, the gRNA core of a PEgRNA may be located at the 3′ end of a spacer. In some embodiments, the gRNA core of a PEgRNA may be located at the 5′ end of a spacer. In some embodiments, the gRNA core of a PEgRNA may be located at the 3′ end of an extension arm. In some embodiments, the gRNA core of a PEgRNA may be located at the 5′ end of an extension arm. In some embodiments, the PEgRNA comprises, from 5′ to 3′: a spacer, a gRNA core, and an extension arm. In some embodiments, the PEgRNA comprises, from 5′ to 3′: a spacer, a gRNA core, an editing template, and a PBS. In some embodiments, the PEgRNA comprises, from 5′ to 3′: an extension arm, a spacer, and a gRNA core. In some embodiments, the PEgRNA comprises, from 5′ to 3′: an editing target, a PBS, a spacer, and a gRNA core.

[0348] In some embodiments, a PEgRNA comprises a single polynucleotide molecule that comprises the spacer sequence, the gRNA core, and the extension arm. In some embodiments, a PEgRNA comprises multiple polynucleotide molecules, for example, two polynucleotide molecules. In some embodiments, a PEgRNA comprise a first polynucleotide molecule that comprises the spacer and a portion of the gRNA core, and a second polynucleotide molecule that comprises the rest of the gRNA core and the extension arm. In some embodiments, the gRNA core portion in the first polynucleotide molecule and the gRNA core portion in the second polynucleotide molecule are at least partly complementary to each other. In some embodiments, the PEgRNA may comprise a first polynucleotide comprising the spacer and a first portion of a gRNA core comprising, which may be also be referred to as a crRNA. In some embodiments, the PEgRNA comprise a second polynucleotide comprising a second portion of the gRNA core and the extension arm, wherein the second portion of the gRNA core may also be referred to as a trans-activating crRNA, or tracr RNA. In some embodiments, the crRNA portion and the tracr RNA portion of the gRNA core are at least partially complementary to each other. In some embodiments, the partially complementary portions of the crRNA and the tracr RNA form a lower stem, a bulge, and an upper stem, as exemplified in FIG. 4.

[0349] In some embodiments, a spacer sequence comprises a region that has substantial complementarity to a search target sequence on the target strand of a double stranded target DNA, e.g. an AT7B gene. In some embodiments, the spacer sequence of a PEgRNA is identical or substantially identical to a protospacer sequence on the edit strand of the double stranded target DNA, e.g., a target gene (except that the protospacer sequence comprises thymine and the spacer sequence may comprise uracil). In some embodiments, the spacer sequence is at least about 70%, 75%, 80%, 85%, 90%, 95%, or 100% complementary to a search target sequence in the double stranded target DNA, e.g., a target gene. In some embodiments, the spacer comprises is substantially complementary to the search target sequence.

[0350] In some embodiments, the length of the spacer varies from at least 10 nucleotides to 100 nucleotides. For examples, a spacer may be at least 10 nucleotides, at least 11 nucleotides, at least 12 nucleotides, at least 13 nucleotides, at least 14 nucleotides, at least 15 nucleotides, at least 16 nucleotides, at least 17 nucleotides, at least 18 nucleotides, at least 19 nucleotides, at least 20 nucleotides, at least 30 nucleotides, at least 40 nucleotides, at least 50 nucleotides, at least 60 nucleotides, at least 70 nucleotides, at least 80 nucleotides, at least 90 nucleotides, at least 100 nucleotides. In some embodiments, the spacer is 16 nucleotides, 17 nucleotides, 18 nucleotides, 19 nucleotides, 20 nucleotides, 21 nucleotides, 22 nucleotides, 23 nucleotides, 24 nucleotides, or 25 nucleotides in length. In some embodiments, the spacer is from 15 nucleotides to 30 nucleotides in length, 15 to 25 nucleotides in length, 18 to 22 nucleotides in length, 10 to 20 nucleotides in length, 20 to 30 nucleotides in length, 30 to 40 nucleotides in length, 40 to 50 nucleotides in length, 50 to 60 nucleotides in length, 60 to 70 nucleotides in length, 70 to 80 nucleotides in length, or 90 nucleotides to 100 nucleotides in length. In some embodiments, the spacer is 20 nucleotides in length. In some embodiments, the spacer is 17 to 18 nucleotides in length.

[0351] As used herein in a PEgRNA or a nick guide RNA sequence, or fragments thereof such as a spacer, PBS, or RTT sequence, unless indicated otherwise, it should be appreciated that the letter “T” or “thymine” indicates a nucleobase in a DNA sequence that encodes the PEgRNA or guide RNA sequence, and is intended to refer to an uracil (U) nucleobase of the PEgRNA or guide RNA or any chemically modified uracil nucleobase known in the art, such as 5-methoxyuracil.

[0352] The extension arm of a PEgRNA may comprise a primer binding site (PBS) and an editing template (e.g., an RTT). The extension arm may be partially complementary to the spacer. In some embodiments, the editing template (e.g., RTT) is partially complementary to the spacer. In some embodiments, the editing template (e.g., RTT) and the primer binding site (PBS) are each partially complementary to the spacer.

[0353] An extension arm of a PEgRNA may comprise a primer binding site sequence (PBS, or PBS sequence) that hybridizes with a free 3′ end of a single stranded DNA in the double stranded target DNA, e.g., a target gene generated by nicking with a prime editor. The length of the PBS sequence may vary depending on, e.g., the prime editor components, the search target sequence and other components of the PEgRNA. In some embodiments, the length of the primer binding site (PBS) varies from at least 2 nucleotides to 50 nucleotides. For examples, a primer binding site (PBS) may be at least 2 nucleotides, at least 3 nucleotides, at least 4 nucleotides, at least 5 nucleotides, at least 6 nucleotides, at least 7 nucleotides, at least 8 nucleotides, at least 9 nucleotides, at least 10 nucleotides, at least 11 nucleotides, at least 12 nucleotides, at least 13 nucleotides, at least 14 nucleotides, at least 15 nucleotides, at least 16 nucleotides, at least 17 nucleotides, at least 18 nucleotides, at least 19 nucleotides, at least 20 nucleotides, at least 30 nucleotides, at least 40 nucleotides, or at least 50 nucleotides in length. In some embodiments, the PBS is at least 6 nucleotides in length. In some embodiments, the PBS is about 4 to 16 nucleotides, about 6 to 16 nucleotides, about 6 to 18 nucleotides, about 6 to 20 nucleotides, about 8 to 20 nucleotides, about 10 to 20 nucleotides, about 12 to 20 nucleotides, about 14 to 20 nucleotides, about 16 to 20 nucleotides, or about 18 to 20 nucleotides in length. In some embodiments, the PBS is about 7 to 15 nucleotides in length. In some embodiments, the PBS is 6, 7, 8, 9, 10, 11, 12, 13, 14, 15, 16, 17, 18, 19, or 20 nucleotides in length. In some embodiments, the PBS is 8, 9, 10, 11, 12, 13, or 14 nucleotides in length.

[0354] The PBS may be complementary or substantially complementary to a DNA sequence in the edit strand of the double stranded target DNA, e.g., a target gene. By annealing with the edit strand at a free hydroxy group, e.g., a free 3′ end generated by prime editor nicking, the PBS may initiate synthesis of a new single stranded DNA encoded by the editing template at the nick site. In some embodiments, the PBS is at least about 70%, 75%, 80%, 85%, 90%, 95%, or 100% complementary to a region of the edit strand of the double stranded target DNA, e.g., a target gene. In some embodiments, the PBS is perfectly complementary, or 100% complementary, to a region of the edit strand of the double stranded target DNA, e.g., a target gene.

[0355] An extension arm of a PEgRNA may comprise an editing template that serves as a DNA synthesis template for the DNA polymerase in a prime editor during prime editing.

[0356] The length of an editing template may vary depending on, e.g., the prime editor components, the search target sequence, and other components of the PEgRNA. In some embodiments, the editing template serves as a DNA synthesis template for a reverse transcriptase, and the editing template is referred to as a reverse transcription editing template (RTT).

[0357] The editing template (e.g., RTT), in some embodiments, is 2, 3, 4, 5, 6, 7, 8, 9, 10, 11, 12, 13, 14, 15, 16, 17, 18, 19, 20, 21, 22, 23, 24, or 25 nucleotides in length. In some embodiments, the RTT is 12, 13, 14, 15, 16, 17, 18, 19, 20, 21, 22, 23, 24, or 25 nucleotides in length. In some embodiments, the RTT is 16, 17, 18, 19, 20, 21, 22, 23, 24, 25, 26, 27, 28, 29, 30, 31, 32, 33, 34, 35, 36, 37, 38, 39, or 40 nucleotides in length.

[0358] In some embodiments, the editing template (e.g., RTT) sequence is about 70%, 75%, 80%, 85%, 90%, 95%, or 99% complementary to the editing target sequence on the edit strand of the double stranded target DNA, e.g., a target gene. In some embodiments, the editing template sequence (e.g., RTT) is substantially complementary to the editing target sequence. In some embodiments, the editing template sequence (e.g., RTT) is complementary to the editing target sequence except at positions of the intended nucleotide edits to be incorporated int the double stranded target DNA, e.g., a target gene. In some embodiments, the editing template comprises a nucleotide sequence comprising about 85% to about 95% complementarity to an editing target sequence in the edit strand in the double stranded target DNA, e.g., a target gene. In some embodiments, the editing template comprises about 86%, about 87%, about 88%, about 89%, about 90%, about 91%, about 92%, about 93%, about 94%, about 95%, about 96%, about 97%, about 98%, or about 99% complementarity to an editing target sequence in the edit strand of the double stranded target DNA, e.g., a target gene.

[0359] An intended nucleotide edit in an editing template of a PEgRNA may comprise various types of alterations as compared to the double stranded target DNA, e.g., a target gene sequence. In some embodiments, the nucleotide edit is a single nucleotide substitution as compared to the double stranded target DNA, e.g., a target gene sequence. In some embodiments, the nucleotide edit is a deletion as compared to the double stranded target DNA, e.g., a target gene sequence. In some embodiments, the nucleotide edit is an insertion as compared to the double stranded target DNA, e.g., a target gene sequence. In some embodiments, the editing template comprises one to ten intended nucleotide edits as compared to the double stranded target DNA, e.g., a target gene sequence. In some embodiments, the editing template comprises one or more intended nucleotide edits as compared to the double stranded target DNA, e.g., a target gene sequence. In some embodiments, the editing template comprises two or more intended nucleotide edits as compared to the double stranded target DNA, e.g., a target gene sequence. In some embodiments, the editing template comprises three or more intended nucleotide edits as compared to the double stranded target DNA, e.g., a target gene sequence. In some embodiments, the editing template comprises four or more, five or more, or six or more intended nucleotide edits as compared to the double stranded target DNA, e.g., a target gene sequence. In some embodiments, the editing template comprises two single nucleotide substitutions, insertions, deletions, or any combination thereof, as compared to the double stranded target DNA, e.g., a target gene sequence. In some embodiments, the editing template comprises three single nucleotide substitutions, insertions, deletions, or any combination thereof, as compared to the double stranded target DNA, e.g., a target gene sequence. In some embodiments, the editing template comprises four, five, or six single nucleotide substitutions, insertions, deletions, or any combination thereof, as compared to the double stranded target DNA, e.g., a target gene sequence. In some embodiments, a nucleotide substitution comprises an adenine (A)-to-thymine (T) substitution. In some embodiments, a nucleotide substitution comprises an A-to-guanine (G) substitution. In some embodiments, a nucleotide substitution comprises an A-to-cytosine (C) substitution. In some embodiments, a nucleotide substitution comprises a T-A substitution. In some embodiments, a nucleotide substitution comprises a T-G substitution. In some embodiments, a nucleotide substitution comprises a T-C substitution. In some embodiments, a nucleotide substitution comprises a G-to-A substitution. In some embodiments, a nucleotide substitution comprises a G-to-T substitution. In some embodiments, a nucleotide substitution comprises a G-to-C substitution. In some embodiments, a nucleotide substitution comprises a C-to-A substitution. In some embodiments, a nucleotide substitution comprises a C-to-T substitution. In some embodiments, a nucleotide substitution comprises a C-to-G substitution.

[0360] In some embodiments, a nucleotide insertion is at least 5 nucleotides, at least 6 nucleotides, at least 7 nucleotides, at least 8 nucleotides, at least 9 nucleotides, at least 10 nucleotides, at least 11 nucleotides, at least 12 nucleotides, at least 13 nucleotides, at least 14 nucleotides, at least 15 nucleotides, at least 16 nucleotides, at least 17 nucleotides, at least 18 nucleotides, at least 19 nucleotides, or at least 20 nucleotides in length. In some embodiments, a nucleotide insertion is from 1 to 2 nucleotides, from 1 to 3 nucleotides, from 1 to 4 nucleotides, from 1 to 5 nucleotides, form 2 to 5 nucleotides, from 3 to 5 nucleotides, from 3 to 6 nucleotides, from 3 to 8 nucleotides, from 4 to 9 nucleotides, from 5 to 10 nucleotides, from 6 to 11 nucleotides, from 7 to 12 nucleotides, from 8 to 13 nucleotides, from 9 to 14 nucleotides, from 10 to 15 nucleotides, from 11 to 16 nucleotides, from 12 to 17 nucleotides, from 13 to 18 nucleotides, from 14 to 19 nucleotides, from 15 to 20 nucleotides in length. In some embodiments, a nucleotide insertion is a single nucleotide insertion. In some embodiments, a nucleotide insertion comprises insertion of two nucleotides.

[0361] The editing template of a PEgRNA may comprise one or more intended nucleotide edits, compared to the double stranded target DNA, e.g., a target gene, to be edited. Position of the intended nucleotide edit(s) relevant to other components of the PEgRNA, or to particular nucleotides (e.g., mutations) in the double stranded target DNA, e.g., a target gene, may vary. In some embodiments, the nucleotide edit is in a region of the PEgRNA corresponding to or homologous to the protospacer sequence. In some embodiments, the nucleotide edit is in a region of the PEgRNA corresponding to a region of the double stranded target DNA outside of the protospacer sequence.

[0362] In some embodiments, the position of a nucleotide edit incorporation in the double stranded target DNA, e.g., a target gene may be determined based on position of the protospacer adjacent motif (PAM). For instance, the intended nucleotide edit may be installed in a sequence corresponding to the protospacer adjacent motif (PAM) sequence. In some embodiments, a nucleotide edit in the editing template is at a position corresponding to the 5′ most nucleotide of the PAM sequence. In some embodiments, a nucleotide edit in the editing template is at a position corresponding to the 3′ most nucleotide of the PAM sequence. In some embodiments, position of an intended nucleotide edit in the editing template may be referred to by aligning the editing template with the partially complementary edit strand of the double stranded target DNA, e.g., a target gene, and referring to nucleotide positions on the editing strand where the intended nucleotide edit is incorporated. In some embodiments, a nucleotide edit is incorporated at a position corresponding to about 0, 1, 2, 3, 4, 5, 6, 7, 8, 9, 10, 11, 12, 13, 14, 15, 16, 17, 18, 19, 20, 21, 22, 23, 24, 25, 26, 27, 28, 29, 30, 31, 32, 33, 34, 35, 36, 37, 38, 39, or 40 nucleotides upstream of the 5′ most nucleotide of the PAM sequence in the edit strand of the double stranded target DNA, e.g., a target gene. By 0 nucleotide upstream or downstream of a reference position, it is meant that the intended nucleotide is immediately upstream or downstream of the reference position. In some embodiments, a nucleotide edit is incorporated at a position corresponding to about 0 to 2 nucleotides, 0 to 4 nucleotides, 0 to 6 nucleotides, 0 to 8 nucleotides, 0 to 10 nucleotides, 2 to 4 nucleotides, 2 to 6 nucleotides, 2 to 8 nucleotides, 2 to 10 nucleotides, 2 to 12 nucleotides, 4 to 6 nucleotides, 4 to 8 nucleotides, 4 to 10 nucleotides, 4 to 12 nucleotides, 4 to 14 nucleotides, 6 to 8 nucleotides, 6 to 10 nucleotides, 6 to 12 nucleotides, 6 to 14 nucleotides, 6 to 16 nucleotides, 8 to 10 nucleotides, 8 to 12 nucleotides, 8 to 14 nucleotides, 8 to 16 nucleotides, 8 to 18 nucleotides, 10 to 12 nucleotides, 10 to 14 nucleotides, 10 to 16 nucleotides, 10 to 18 nucleotides, 10 to 20 nucleotides, 12 to 14 nucleotides, 12 to 16 nucleotides, 12 to 18 nucleotides, 12 to 20 nucleotides, 12 to 22 nucleotides, 14 to 16 nucleotides, 14 to 18 nucleotides, 14 to 20 nucleotides, 14 to 22 nucleotides, 14 to 24 nucleotides, 16 to 18 nucleotides, 16 to 20 nucleotides, 16 to 22 nucleotides, 16 to 24 nucleotides, 16 to 26 nucleotides, 18 to 20 nucleotides, 18 to 22 nucleotides, 18 to 24 nucleotides, 18 to 26 nucleotides, 18 to 28 nucleotides, 20 to 22 nucleotides, 20 to 24 nucleotides, 20 to 26 nucleotides, 20 to 28 nucleotides, or 20 to 30 nucleotides upstream of the 5′ most nucleotide of the PAM sequence. In some embodiments, the nucleotide edit is incorporated at a position corresponding to 3 nucleotides upstream of the 5′ most nucleotide of the PAM sequence. In some embodiments, the nucleotide edit in is incorporated at a position corresponding to 4 nucleotides upstream of the 5′ most nucleotide of the PAM sequence. In some embodiments, the nucleotide edit is incorporated at a position corresponding to 5 nucleotides upstream of the 5′ most nucleotide of the PAM sequence. In some embodiments, the nucleotide edit in the editing template is at a position corresponding to 6 nucleotides upstream of the 5′ most nucleotide of the PAM sequence.

[0363] In some embodiments, an intended nucleotide edit is incorporated at a position corresponding to about 0, 1, 2, 3, 4, 5, 6, 7, 8, 9, 10, 11, 12, 13, 14, 15, 16, 17, 18, 19, 20, 21, 22, 23, 24, 25, 26, 27, 28, 29, 30, 31, 32, 33, 34, 35, 36, 37, 38, 39, or 40 nucleotides downstream of the 5′ most nucleotide of the PAM sequence in the edit strand of the double stranded target DNA, e.g., a target gene. In some embodiments, a nucleotide edit is incorporated at a position corresponding to about 0 to 2 nucleotides, 0 to 4 nucleotides, 0 to 6 nucleotides, 0 to 8 nucleotides, 0 to 10 nucleotides, 2 to 4 nucleotides, 2 to 6 nucleotides, 2 to 8 nucleotides, 2 to 10 nucleotides, 2 to 12 nucleotides, 4 to 6 nucleotides, 4 to 8 nucleotides, 4 to 10 nucleotides, 4 to 12 nucleotides, 4 to 14 nucleotides, 6 to 8 nucleotides, 6 to 10 nucleotides, 6 to 12 nucleotides, 6 to 14 nucleotides, 6 to 16 nucleotides, 8 to 10 nucleotides, 8 to 12 nucleotides, 8 to 14 nucleotides, 8 to 16 nucleotides, 8 to 18 nucleotides, 10 to 12 nucleotides, 10 to 14 nucleotides, 10 to 16 nucleotides, 10 to 18 nucleotides, 10 to 20 nucleotides, 12 to 14 nucleotides, 12 to 16 nucleotides, 12 to 18 nucleotides, 12 to 20 nucleotides, 12 to 22 nucleotides, 14 to 16 nucleotides, 14 to 18 nucleotides, 14 to 20 nucleotides, 14 to 22 nucleotides, 14 to 24 nucleotides, 16 to 18 nucleotides, 16 to 20 nucleotides, 16 to 22 nucleotides, 16 to 24 nucleotides, 16 to 26 nucleotides, 18 to 20 nucleotides, 18 to 22 nucleotides, 18 to 24 nucleotides, 18 to 26 nucleotides, 18 to 28 nucleotides, 20 to 22 nucleotides, 20 to 24 nucleotides, 20 to 26 nucleotides, 20 to 28 nucleotides, or 20 to 30 nucleotides downstream of the 5′ most nucleotide of the PAM sequence. In some embodiments, a nucleotide edit is incorporated at a position corresponding to 3 nucleotides downstream of the 5′ most nucleotide of the PAM sequence. In some embodiments, a nucleotide edit is incorporated at a position corresponding to 4 nucleotides downstream of the 5′ most nucleotide of the PAM sequence. In some embodiments, a nucleotide edit is incorporated at a position corresponding to 5 nucleotides downstream of the 5′ most nucleotide of the PAM sequence. In some embodiments, a nucleotide edit is incorporated at a position corresponding to 6 nucleotides downstream of the 5′ most nucleotide of the PAM sequence. By “upstream” and “downstream” it is intended to define relevant positions at least two regions or sequences in a nucleic acid molecule orientated in a 5′-to-3′ direction. For example, a first sequence is upstream of a second sequence in a DNA molecule where the first sequence is positioned 5′ to the second sequence. Accordingly, the second sequence is downstream of the first sequence.

[0364] When referred to in the PEgRNA, positions of the one or more intended nucleotide edits may be referred to relevant to components of the PEgRNA. For example, an intended nucleotide edit may be 5′ or 3′ to the PBS. In some embodiments, a PEgRNA comprises the structure, from 5′ to 3′: a spacer, a gRNA core, an editing template, and a PBS. In some embodiments, the intended nucleotide edit is 0, 1, 2, 3, 4, 5, 6, 7, 8, 9, 10, 11, 12, 13, 14, 15, 16, 17, 18, 19, 20, 21, 22, 23, 24, 25, 26, 27, 28, 29, 30, 31, 32, 33, 34, 35, 36, 37, 38, 39, or 40 base pairs upstream to the 5′ most nucleotide of the PBS. In some embodiments, the intended nucleotide edit is 0 to 2 base pairs, 0 to 4 base pairs, 0 to 6 base pairs, 0 to 8 base pairs, 0 to 10 base pairs, 2 to 4 base pairs, 2 to 6 base pairs, 2 to 8 base pairs, 2 to 10 base pairs, 2 to 12 base pairs, 4 to 6 base pairs, 4 to 8 base pairs, 4 to 10 base pairs, 4 to 12 base pairs, 4 to 14 base pairs, 6 to 8 base pairs, 6 to 10 base pairs, 6 to 12 base pairs, 6 to 14 base pairs, 6 to 16 base pairs, 8 to 10 base pairs, 8 to 12 base pairs, 8 to 14 base pairs, 8 to 16 base pairs, 8 to 18 base pairs, 10 to 12 base pairs, 10 to 14 base pairs, 10 to 16 base pairs, 10 to 18 base pairs, 10 to 20 base pairs, 12 to 14 base pairs, 12 to 16 base pairs, 12 to 18 base pairs, 12 to 20 base pairs, 12 to 22 base pairs, 14 to 16 base pairs, 14 to 18 base pairs, 14 to 20 base pairs, 14 to 22 base pairs, 14 to 24 base pairs, 16 to 18 base pairs, 16 to 20 base pairs, 16 to 22 base pairs, 16 to 24 base pairs, 16 to 26 base pairs, 18 to 20 base pairs, 18 to 22 base pairs, 18 to 24 base pairs, 18 to 26 base pairs, 18 to 28 base pairs, 20 to 22 base pairs, 20 to 24 base pairs, 20 to 26 base pairs, 20 to 28 base pairs, or 20 to 30 base pairs upstream to the 5′ most nucleotide of the PBS.

[0365] The corresponding positions of the intended nucleotide edit incorporated in the double stranded target DNA, e.g., a target gene may also be referred to based on the nicking position generated by a prime editor based on sequence homology and complementarity. For example, in embodiments, the distance between the nucleotide edit to be incorporated into the double stranded target DNA, e.g., a target gene, and the nick generated by the prime editor may be determined when the spacer hybridizes with the search target sequence and the extension arm hybridizes with the editing target sequence. In certain embodiments, the position of the nucleotide edit can be in any position downstream of the nick site on the edit strand (or the PAM strand) generated by the prime editor, such that the distance between the nick site and the intended nucleotide edit is 0, 1, 2, 3, 4, 5, 6, 7, 8, 9, 10, 11, 12, 13, 14, 15, 16, 17, 18, 19, 20, 21, 22, 23, 24, 25, 26, 27, 28, 29, or 30 nucleotides in length. In some embodiments, the position of the nucleotide edit is 0, 1, 2, 3, 4, 5, 6, 7, 8, 9, 10, 11, 12, 13, 14, 15, 16, 17, 18, 19, 20, 21, 22, 23, 24, 25, 26, 27, 28, 29, or 30 nucleotides upstream of the nick site on the edit strand. In some embodiments, the position of the nucleotide edit is 0, 1, 2, 3, 4, 5, 6, 7, 8, 9, 10, 11, 12, 13, 14, 15, 16, 17, 18, 19, 20, 21, 22, 23, 24, 25, 26, 27, 28, 29, or 30 nucleotides downstream of the nick site on the edit strand. In some embodiments, the position of the nucleotide edit is 0 base pairs from the nick site on the edit strand, that is, the editing position is at the same position as the nick site. As used herein, the distance between the nick site and the nucleotide edit, for example, where the nucleotide edit comprises an insertion or deletion, refers to the 5′ most position of the nucleotide edit for a nick that creates a 3′ free end on the edit strand (i.e., the “near position” of the nucleotide edit to the nick site). Similarly, as used herein, the distance between the nick site and a PAM position edit, for example, where the nucleotide edit comprises an insertion, deletion, or substitution of two or more contiguous nucleotides, refers to the 5′ most position of the nucleotide edit and the 5′ most position of the PAM sequence.

[0366] In some embodiments, the editing template extends beyond a nucleotide edit to be incorporated to the double stranded target DNA, e.g., a target gene, sequence. For example, in some embodiments, the editing template comprises at least 1, 2, 3, 4, 5, 6, 7, 8, 9, 10, 11, 12, 13, 14, 15, 16, 17, 18, 19, 20, 21, 22, 23, 24, 25, 26, 27, 28, 29 or 30 base pairs 3′ to the nucleotide edit to be incorporated to the double stranded target DNA, e.g., a target gene, sequence. In some embodiments, the editing template comprises at least 4 to 30 base pairs 3′ to the nucleotide edit to be incorporated to the double stranded target DNA, e.g., a target gene, sequence. In some embodiments, the editing template comprises at least 4 to 25 base pairs 3′ to the nucleotide edit to be incorporated to the double stranded target DNA, e.g., a target gene, sequence. In some embodiments, the editing template comprises at least 4 to 20 base pairs 3′ to the nucleotide edit to be incorporated to the double stranded target DNA, e.g., a target gene, sequence. In some embodiments, the editing template comprises at least 4 to 30 base pairs 5′ to the nucleotide edit to be incorporated to the double stranded target DNA, e.g., a target gene, sequence. In some embodiments, the editing template comprises at least 4 to 25 base pairs 5′ to the nucleotide edit to be incorporated to the double stranded target DNA, e.g., a target gene, sequence. In some embodiments, the editing template comprises at least 4 to 20 base pairs 5′ to the nucleotide edit to be incorporated to the double stranded target DNA, e.g., a target gene, sequence.

[0367] In some embodiments, the editing template comprises an adenine at the first nucleobase position (e.g., for a PEgRNA following 5′-spacer-gRNA core-RTT-PBS-3′ orientation, the 5′ most nucleobase is the “first base”). In some embodiments, the editing template comprises a guanine at the first nucleobase position (e.g., for a PEgRNA following 5′-spacer-gRNA core-RTT-PBS-3′ orientation, the 5′ most nucleobase is the “first base”). In some embodiments, the editing template comprises an uracil at the first nucleobase position (e.g., for a PEgRNA following 5′-spacer-gRNA core-RTT-PBS-3′ orientation, the 5′ most nucleobase is the “first base”). In some embodiments, the editing template comprises a cytosine at the first nucleobase position (e.g., for a PEgRNA following 5′-spacer-gRNA core-RTT-PBS-3′ orientation, the 5′ most nucleobase is the “first base”). In some embodiments, the editing template does not comprise a cytosine at the first nucleobase position (e.g., for a PEgRNA following 5′-spacer-gRNA core-RTT-PBS-3′ orientation, the 5′ most nucleobase is the “first base”).

[0368] The editing template of a PEgRNA may encode a new single stranded DNA (e.g. by reverse transcription) to replace a target sequence in the double stranded target DNA, e.g., a target gene. In some embodiments, the editing target sequence in the edit strand of the double stranded target DNA, e.g., a target gene is replaced by the newly synthesized strand, and the nucleotide edit(s) are incorporated in the region of the double stranded target DNA, e.g., a target gene. In some embodiments, the newly synthesized DNA strand replaces the editing target sequence in the double stranded target DNA, e.g., a target gene, wherein the editing target sequence (or the endogenous sequence complementary to the editing target sequence on the target strand of the target gene) comprises a mutation compared to a wild-type sequence of the same gene, wherein incorporation of the one or more intended nucleotide edits corrects the mutation.

[0369] A guide RNA core (also referred to herein as the gRNA core, gRNA scaffold, or gRNA backbone sequence) of a PEgRNA may contain a polynucleotide sequence that binds to a DNA binding domain (e.g., Cas9) of a prime editor. The gRNA core may interact with a prime editor as described herein, for example, by association with a DNA binding domain, such as a DNA nickase of the prime editor.

[0370] One of skill in the art will recognize that different prime editors having different DNA binding domains from different DNA binding proteins may require different gRNA core sequences specific to the DNA binding protein. In some embodiments, the gRNA core is capable of binding to a Cas9-based prime editor. In some embodiments, the gRNA core is capable of binding to a Cpf1-based prime editor. In some embodiments, the gRNA core is capable of binding to a Cas12b-based prime editor.

[0371] In some embodiments, the gRNA core comprises regions and secondary structures involved in binding with specific CRISPR Cas proteins. For example, in a Cas9 based prime editing system, the gRNA core of a PEgRNA may comprise one or more regions of a base paired “lower stem” adjacent to the spacer sequence and a base paired “upper stem” following the lower stem, where the lower stem and upper stem may be connected by a “bulge” comprising unpaired RNAs. The gRNA core may further comprise a “nexus” distal from the spacer sequence, followed by a hairpin structure, e.g., at the 3′ end, as exemplified in FIG. 4. In some embodiments, the gRNA core comprises modified nucleotides as compared to a wild-type gRNA core in the lower stem, upper stem, and/or the hairpin. For example, nucleotides in the lower stem, upper stem, an/or the hairpin regions may be modified, deleted, or replaced. In some embodiments, RNA nucleotides in the lower stem, upper stem, an/or the hairpin regions may be replaced with one or more DNA sequences. In some embodiments, the gRNA core comprises unmodified or wild-type RNA sequences in the nexus and/or the bulge regions. In some embodiments, the gRNA core does not include long stretches of A-T pairs, for example, a GUUUU-AAAAC pairing element.

[0372] In some embodiments, the gRNA core comprises the sequence:

(SEQ ID NO: 556)
GUUUGAGAGCUAGAAAUAGCAAGUUUAAAUAAGGCUAG
UCCGUUAUCAACUUGAAAAAGUGGGACCGAGUCGGUCC,
or
(SEQ ID NO: 557)
GUUUAAGAGCUAUGCUGGAAACAGCAUAGCAAGUUUAA
AUAAGGCUAGUCCGUUAUCAACUUGAAAAAGUGGCACC
GAGUCGGUGC

In some embodiments, the gRNA core comprises the sequence

(SEQ ID NO: 558)
GUUUUAGAGCUAGAAAUAGCAAGUUAAAAUAAGGCUAG
UCCGUUAUCAACUUGAAAAAGUGGCACCGAGUCGGUGC

Any gRNA core sequences known in the art are also contemplated in the prime editing compositions described herein.

[0373] A PEgRNA may also comprise optional modifiers, e.g., 3′ end modifier region and/or an 5′ end modifier region. In some embodiments, a PEgRNA comprises at least one nucleotide that is not part of a spacer, a gRNA core, or an extension arm. The optional sequence modifiers could be positioned within or between any of the other regions shown, and not limited to being located at the 3′ and 5′ ends. In certain embodiments, the PEgRNA comprises secondary RNA structure, such as, but not limited to, aptamers, hairpins, stem/loops, toeloops, and/or RNA-binding protein recruitment domains (e.g., the MS2 aptamer which recruits and binds to the MS2cp protein). In some embodiments, a PEgRNA comprises a short stretch of uracil at the 5′ end or the 3′ end. For example, in some embodiments, a PEgRNA comprising a 3′ extension arm comprises a “UUU” sequence at the 3′ end of the extension arm. In some embodiments, a PEgRNA comprises a toeloop sequence at the 3′ end. In some embodiments, the PEgRNA comprises a 3′ extension arm and a toeloop sequence at the 3′ end of the extension arm. In some embodiments, the PEgRNA comprises a 5′ extension arm and a toeloop sequence at the 5′ end of the extension arm. In some embodiments, the PEgRNA comprises a toeloop element having the sequence 5′-GAAANNNNN-3′, wherein N is any nucleobase. In some embodiments, the secondary RNA structure is positioned within the spacer. In some embodiments, the secondary structure is positioned within the extension arm. In some embodiments, the secondary structure is positioned within the gRNA core. In some embodiments, the secondary structure is positioned between the spacer and the gRNA core, between the gRNA core and the extension arm, or between the spacer and the extension arm. In some embodiments, the secondary structure is positioned between the PBS and the editing template. In some embodiments the secondary structure is positioned at the 3′ end or at the 5′ end of the PEgRNA. In some embodiments, the PEgRNA comprises a transcriptional termination signal at the 3′ end of the PEgRNA. In addition to secondary RNA structures, the PEgRNA may comprise a chemical linker or a poly(N) linker or tail, where “N” can be any nucleobase. In some embodiments, the chemical linker may function to prevent reverse transcription of the gRNA core.

[0374] The 3′ end sequence and the 5′ end sequence of a PEgRNA can be any one of the functional components of the PEgRNA and can comprise any sequence known in the art. In some embodiments, the PEgRNA comprises an extension arm at the 3′ end. For example, the PEgRNA may comprise the structure, from 5′ to 3′: a spacer, a gRNA core, an editing template (e.g., RTT), and a PBS. In some embodiments, the PEgRNA comprises a gRNA core at the 3′ end. For example, the PEgRNA may comprise the structure, from 5′ to 3′: an editing template (e.g., RTT), a PBS, a spacer, and a gRNA core. In some embodiments, the PEgRNA comprises a specific nucleotide sequence at the 3′ end. In some embodiments, the three 3′ most nucleotides of the PEgRNA are 5′-UUU-3′. In some embodiments, the four 3′ most nucleotides of the PEgRNA are 5′-UUUU-3′. In some embodiments, the three 3′ most nucleotides of the PEgRNA are not 5′-UUU-3′ In some embodiments, the four 3′ most nucleotides of the PEgRNA are not 5′-UUUU-3′. In some embodiments, the PEgRNA does not comprise two consecutive uracils in the three 3′ most nucleotides. In some embodiments, the PEgRNA does not comprise two consecutive uracils in the four 3′ most nucleotides. In some embodiments, the PEgRNA does not comprise a uracil in the four 3′ most nucleotides. In some embodiments, the PEgRNA does not comprise a uracil in the three 3′ most nucleotides. In some embodiments, the PEgRNA is chemically synthesized.

[0375] In some embodiments, a prime editing system or composition further comprises a nick guide polynucleotide, such as a nick guide RNA (ngRNA). Without wishing to be bound by any particular theory, the non-edit strand of a double stranded target DNA in the double stranded target DNA, e.g., a target gene may be nicked by a CRISPR-Cas nickase directed by an ngRNA. In some embodiments, the nick on the non-edit strand directs endogenous DNA repair machinery to use the edit strand as a template for repair of the non-edit strand, which may increase efficiency of prime editing. In some embodiments, the non-edit strand is nicked by a prime editor localized to the non-edit strand by the ngRNA. Accordingly, also provided herein are PEgRNA systems comprising at least one PEgRNA and at least one ngRNA.

[0376] In some embodiments, the ngRNA is a guide RNA which contains a variable spacer sequence and a guide RNA scaffold or core region that interacts with the DNA binding domain, e.g. Cas9 of the prime editor. In some embodiments, the ngRNA comprises a spacer sequence (referred to herein as an ng spacer, or a second spacer) that is substantially complementary to a second search target sequence (or ng search target sequence), which is located on the edit strand, or the non-target strand. Thus, in some embodiments, the ng search target sequence recognized by the ng spacer and the search target sequence recognized by the spacer sequence of the PEgRNA are on opposite strands of the double stranded target DNA of double stranded target DNA, e.g., a target gene. A prime editing system or complex comprising a ngRNA may be referred to as a “PE3” prime editing system, PE3 prime editing compositions or PE3 prime editing complex.

[0377] In some embodiments, the ng search target sequence is located on the non-target strand, within 10 nucleotides to 100 nucleotides of an intended nucleotide edit incorporated by the PEgRNA on the edit strand. In some embodiments, the ng target search target sequence is within 10 bp, 20 bp, 30 bp, 40 bp, 50 bp, 60 bp, 70 bp, 80 bp, 90 bp, 91 bp, 92 bp, 93 bp, 94 bp, 95 bp, 96 bp, 97 bp, 98 bp, 99 bp, or 100 bp of an intended nucleotide edit incorporated by the PEgRNA on the edit strand. In some embodiments, the 5′ ends of the ng search target sequence and the PEgRNA search target sequence are within 1, 2, 3, 4, 5, 6, 7, 8, 9, or 10 bp apart from each other. In some embodiments, the 5′ ends of the ng search target sequence and the PEgRNA search target sequence are within 10 bp, 20 bp, 30 bp, 40 bp, 50 bp, 60 bp, 70 bp, 80 bp, 90 bp, 91 bp, 92 bp, 93 bp, 94 bp, 95 bp, 96 bp, 97 bp, 98 bp, 99 bp, or 100 bp apart from each other.

[0378] In some embodiments, an ng spacer sequence is complementary to, and may hybridize with the second search target sequence only after an intended nucleotide edit has been incorporated on the edit strand, by the editing template of a PEgRNA. Such a prime editing system maybe referred to as a “PE3b” prime editing system or composition. In some embodiments, the ngRNA comprises a spacer sequence that matches only the edit strand after incorporation of the nucleotide edits, but not the endogenous double stranded target DNA, e.g., a target gene sequence on the edit strand. Accordingly, in some embodiments, an intended nucleotide edit is incorporated within the ng search target sequence. In some embodiments, the intended nucleotide edit is incorporated within about 1-10 nucleotides of the position corresponding to the PAM of the ng search target sequence.

[0379] A PEgRNA and/or an ngRNA of this disclosure, in some embodiments, may include modified nucleotides, e.g., chemically modified DNA or RNA nucleobases, and may include one or more nucleobase analogs (e.g., modifications which might add functionality, such as temperature resilience). In some embodiments, PEgRNAs and/or ngRNAs as described herein may be chemically modified. The phrase “chemical modifications,” as used herein, can include modifications which introduce chemistries which differ from those seen in naturally occurring DNA or RNAs, for example, covalent modifications such as the introduction of modified nucleotides, (e.g., nucleotide analogs, or the inclusion of pendant groups which are not naturally found in DNA or RNA molecules).

[0380] In some embodiments, the PEgRNAs and/or ngRNAs provided in this disclosure may have undergone a chemical or biological modifications. Modifications may be made at any position within a PEgRNA or ngRNA, and may include modification to a nucleobase or to a phosphate backbone of the PEgRNA or ngRNA. In some embodiments, chemical modifications can be structure guided modifications. In some embodiments, a chemical modification is at the 5′ end and/or the 3′ end of a PEgRNA. In some embodiments, a chemical modification is at the 5′ end and/or the 3′ end of a ngRNA. In some embodiments, a chemical modification may be within the spacer sequence, the extension arm, the editing template sequence, or the primer binding site of a PEgRNA. In some embodiments, a chemical modification may be within the spacer sequence or the gRNA core of a PEgRNA or a ngRNA. In some embodiments, a chemical modification may be within the 3′ most nucleotides of a PEgRNA or ngRNA. In some embodiments, a chemical modification may be within the 3′ most end of a PEgRNA or ngRNA. In some embodiments, a chemical modification may be within the 5′ most end of a PEgRNA or ngRNA. In some embodiments, a PEgRNA or ngRNA comprises 1, 2, 3, 4, 5, 6, 7, 8, 9, 10 or more chemically modified nucleotides at the 3′ end. In some embodiments, a PEgRNA or ngRNA comprises 3 contiguous chemically modified nucleotides at the 3′ end. In some embodiments, a PEgRNA or ngRNA comprises 1, 2, 3, 4, 5, 6, 7, 8, 9, 10 or more chemically modified nucleotides at the 5′ end. In some embodiments, a PEgRNA or ngRNA comprises 1, 2, 3, 4, or 5 or more chemically modified nucleotides at the 3′ end. In some embodiments, a PEgRNA or ngRNA comprises 1, 2, 3, 4, or 5 more chemically modified nucleotides at the 5′ end. In some embodiments, a PEgRNA or ngRNA comprises 1, 2, or 3 or more chemically modified nucleotides at the 3′ end. In some embodiments, a PEgRNA or ngRNA comprises 1, 2, or 3 more chemically modified nucleotides at the 5′ end. In some embodiments, a PEgRNA or ngRNA comprises 1, 2, 3, 4, 5, 6, 7, 8, 9, 10 or more contiguous chemically modified nucleotides at the 3′ end. In some embodiments, a PEgRNA or ngRNA comprises 1, 2, 3, 4, 5, 6, 7, 8, 9, 10 or more contiguous chemically modified nucleotides at the 5′ end. In some embodiments, a PEgRNA or ngRNA comprises 1, 2, 3, 4, or 5 contiguous chemically modified nucleotides at the 3′ end. In some embodiments, a PEgRNA or ngRNA comprises 1, 2, 3, 4, or 5 contiguous chemically modified nucleotides at the 5′ end. In some embodiments, a PEgRNA or ngRNA comprises 1, 2, or 3 contiguous chemically modified nucleotides at the 3′ end. In some embodiments, a PEgRNA or ngRNA comprises 1, 2, or 3 contiguous chemically modified nucleotides at the 5′ end. In some embodiments, a PEgRNA or ngRNA comprises 3 contiguous chemically modified nucleotides at the 3′ end. In some embodiments, a PEgRNA or ngRNA comprises 1, 2, 3, 4, 5, or more chemically modified nucleotides near the 3′ end. In some embodiments, a PEgRNA or ngRNA comprises 3 contiguous chemically modified nucleotides at the 3′ end. In some embodiments, a PEgRNA or ngRNA comprises 3 contiguous chemically modified nucleotides at the 5′ end. In some embodiments, a PEgRNA or ngRNA comprises 1, 2, 3, 4, 5, or more chemically modified nucleotides near the 3′ end. In some embodiments, a PEgRNA or ngRNA comprises 1, 2, 3, 4, 5, or more contiguous chemically modified nucleotides near the 3′ end. In some embodiments, a PEgRNA or ngRNA comprises 1, 2, 3, 4, 5, or more chemically modified nucleotides near the 3′ end, where the 3′ most nucleotide is not modified, and the 1, 2, 3, 4, 5, or more chemically modified nucleotides precede the 3′ most nucleotide in a 5′-to-3′ order. In some embodiments, a PEgRNA or ngRNA comprises 1, 2, 3, 4, 5, 6, 7, 8, 9, 10, 11, 12, 13, 14, 15, 16, 17, 18, 19, 20, 21, 22, 23, 24, 25, 26, 27, 28, 29, 30, 31, 32, 33, 34, 35 or more chemically modified nucleotides near the 3′ end, where the 3′ most nucleotide is not modified, and the 1, 2, 3, 4, 5, 6, 7, 8, 9, 10, 11, 12, 13, 14, 15, 16, 17, 18, 19, 20, 21, 22, 23, 24, 25, 26, 27, 28, 29, 30, 31, 32, 33, 34, 35 or more chemically modified nucleotides precede the 3′ most nucleotide in a 5′-to-3′ order.

[0381] In some embodiments, a PEgRNA or ngRNA comprises one or more chemical modified nucleotides in the gRNA core. As exemplified in FIG. 4, the gRNA core of a PEgRNA may comprise one or more regions of a base paired lower stem, a base paired upper stem, where the lower stem and upper stem may be connected by a bulge comprising unpaired RNAs. The gRNA core may further comprise a nexus distal from the spacer sequence. In some embodiments, the gRNA core comprises one or more chemically modified nucleotides in the lower stem, upper stem, and/or the hairpin regions. In some embodiments, all of the nucleotides in the lower stem, upper stem, and/or the hairpin regions are chemically modified.

[0382] A chemical modification to a PEgRNA or ngRNA can comprise a 2′-O-thionocarbamate-protected nucleoside phosphoramidite, a 2′-O-methyl (M), a 2′-O-methyl 3′phosphorothioate (MS), or a 2′-O-methyl 3′thioPACE (MSP), or any combination thereof. In some embodiments, a chemical modification to a PEgRNA or ngRNA comprises a nucleotide sugar modification. In some embodiments, the chemical modification comprises a 2′O—C1-4alkyl modification. In some embodiments, the chemical modification comprises a 2′-O—C1-3alkyl modification. In some embodiments, the chemical modification comprises a 2′-O-methyl (2′-OMe), 2′-deoxy (2′-H), a, for example, 2′-fluoro (2′-F), 2′-methoxyethyl (2′-MOE), 2′-amino (“2′-NH2”), or 2′-arabinosyl (“2′-arabino”), 2′-F-arabinosyl (“2′-F-arabino”) modification. In some embodiments, a chemically modification to a PEgRNA and/or ngRNA comprises an internucleotide linkage modification. In some embodiments, the internucleotide linkage is a phosphorothioate (“PS”), phosphonocarboxylate (P(CH2)nCOOR), phosphoroacetate (PACE), (P(CH2COO—)) thiophosphonocarboxylate ((S)P(CH2)nCOOR), thiophosphonoacetate (thioPACE), ((S)P(CH2COO—)), alkylphosphonate (P(C1-3alkyl) such as methylphosphonate —P(CH3), boranophosphonate (P(BH3)), or phosphorodithioate (P(S)2) modification. In some embodiments, the chemically modified PEgRNA or ngRNA is a 2′-O-methyl (M) RNA, a 2′-O-methyl 3′phosphorothioate (MS) RNA, a 3′thioPACE RNA, a 2′-O-methyl 3′thioPACE (MSP) RNA, a 2′-F RNA, or a RNA having any other chemical modifications known in the art, or any combination thereof. A chemical modification may also include, for example, the incorporation of non-nucleotide linkages or modified nucleotides into the PEgRNA and/or ngRNA (e.g., modifications to one or both of the 3′ and 5′ ends of a guide RNA molecule). Such modifications can include the addition of bases to an RNA sequence, complexing the RNA with an agent (e.g., a protein or a complementary nucleic acid molecule), and inclusion of elements which change the structure of an RNA molecule (e.g., which form secondary structures).

[0383] In some embodiments, the PEgRNA comprises the sequence of 5′-mXmXmXmXmX-[rest of spacer sequence-gRNA core-rest of extension arm sequence]-mXmXmXmXmX-3′, wherein X is any nucleotide, wherein the “rest of spacer sequence” represent the unmodified nucleotides of the spacer sequence, wherein the “rest of extension arm sequence” represent the unmodified nucleotides of the extension arm sequence. As used herein in the context of a PEgRNA sequence or guide RNA sequence chemical modification, “m” stands for a 2′-O-methyl modification.

[0384] In some embodiments, the PEgRNA comprises the sequence of 5′-mX*mX*mX*mX*mX*-[rest of spacer sequence-gRNA core-rest of extension arm sequence]-mX*mX*mX*mX*mX*-3′, wherein X is any nucleotide, wherein the “rest of spacer sequence” represent the unmodified nucleotides of the spacer sequence, wherein the “rest of extension arm sequence” represent the unmodified nucleotides of the extension arm sequence. As used herein in the context of a PEgRNA sequence or guide RNA sequence chemical modification, “*” stands for a phosphorothioate linkage.

[0385] In some embodiments, the PEgRNA comprises the sequence of 5′-mXmXmXmX-[rest of spacer sequence-gRNA core-rest of extension arm sequence]-mXmXmXmX-3′, wherein X is any nucleotide, wherein the “rest of spacer sequence” represent the unmodified nucleotides of the spacer sequence, wherein the “rest of extension arm sequence” represent the unmodified nucleotides of the extension arm sequence.

[0386] In some embodiments, the PEgRNA comprises the sequence of 5′-mX*mX*mX*mX*-[rest of spacer sequence-gRNA core-rest of extension arm sequence]-mX*mX*mX*mX*-3′, wherein X is any nucleotide, wherein the “rest of spacer sequence” represent the unmodified nucleotides of the spacer sequence, wherein the “rest of extension arm sequence” represent the unmodified nucleotides of the extension arm sequence.

[0387] In some embodiments, the PEgRNA comprises the sequence of 5′-mXmXmXmXmX-[rest of spacer sequence-gRNA core-rest of extension arm sequence]-mXmXmXmXmX-3′, wherein X is any nucleotide, wherein the “rest of spacer sequence” represent the unmodified nucleotides of the spacer sequence, wherein the “rest of extension arm sequence” represent the unmodified nucleotides of the extension arm sequence.

[0388] In some embodiments, the PEgRNA comprises the sequence of 5′-mX*mX*mX*-rest of spacer sequence-gRNA core-rest of extension arm sequence]-mX*mX*mX*-3′, wherein X is any nucleotide, wherein the “rest of spacer sequence” represent the unmodified nucleotides of the spacer sequence, wherein the “rest of extension arm sequence” represent the unmodified nucleotides of the extension arm sequence.

[0389] In some embodiments, the PEgRNA comprises the sequence of 5′-mXmX-[rest of spacer sequence-gRNA core-rest of extension arm sequence]-mXmX-3′, wherein X is any nucleotide, wherein the “rest of spacer sequence” represent the unmodified nucleotides of the spacer sequence, wherein the “rest of extension arm sequence” represent the unmodified nucleotides of the extension arm sequence.

[0390] In some embodiments, the PEgRNA comprises the sequence of 5′-mX*mX*-[rest of spacer sequence-gRNA core-rest of extension arm sequence]-mX*mX*-3′, wherein X is any nucleotide, wherein the “rest of spacer sequence” represent the unmodified nucleotides of the spacer sequence, wherein the “rest of extension arm sequence” represent the unmodified nucleotides of the extension arm sequence.

[0391] In some embodiments, the PEgRNA comprises the sequence of 5′-mX-[rest of spacer sequence-gRNA core-rest of extension arm sequence]-mX-3′, wherein X is any nucleotide, wherein the “rest of spacer sequence” represent the unmodified nucleotides of the spacer sequence, wherein the “rest of extension arm sequence” represent the unmodified nucleotides of the extension arm sequence.

[0392] In some embodiments, the PEgRNA comprises the sequence of 5′-mX*-[rest of spacer sequence-gRNA core-rest of extension arm sequence]-mX*-3′, wherein X is any nucleotide, wherein the “rest of spacer sequence” represent the unmodified nucleotides of the spacer sequence, wherein the “rest of extension arm sequence” represent the unmodified nucleotides of the extension arm sequence.

In some embodiments, the PEgRNA comprises
the sequence of
(SEQ ID NO: 559)
5′-mC*mA*mU*GGUGCACCUGACUCCUGGUUUUAGAGCUAGAAAUA
GCAAGUUAAAAUAAGGCUAGUCCGUUAUCAACUUGAAAAAGUGGG
ACCGAGUCGGUGCAGACUUCUCCACAGGAGUCAGGUGCAC
mU*mU*mU*U-3′.
In some embodiments, the PEgRNA comprises
the sequence of
(SEQ ID NO: 560)
5′-
CAUGGUGCACCUGACUCCUGGUUUUAGAGCUAGAAAUAGC
AAGUUAAAAUAAGGCUAGUCCGUUAUCAACUUGAAAAAGU
GGGACCGAGUCGGUGCAGACUUCUCCACAGGAGUCAGGUG
CACUUUU-3′.
In some embodiments, the PEgRNA comprises
the sequence of
(SEQ ID NO: 561)
5′-
mC*mA*mU*GGUGCACCUGACUCCUGGUUUUAGAGCUAGAAAUAGCAAG
UUAAAAUAAGGCUAGUCCGUUAUCAACUUGAAAAAGUGGG
ACCGAGUCGGUGCAGACUUCUCCACAGGAGUCAGGUGCAC
-3′.
In some embodiments, the PEgRNA comprises
the sequence of
(SEQ ID NO: 562)
5′-
mC*mA*mU*GGUGCACCUGACUCCUGGUUUUAGAGCUAGAAAUAGC
AAGUUAAAAUAAGGCUAGUCCGUUAUCAACUUGAAAAAGUGGG
ACCGAGUCGGUGCAGACUUCUCCACAGGAGUCAGGUGmC*mA*mC*-3′.
In some embodiments, the PERNA comprises
the sequence of
(SEQ ID NO: 563)
5′-
CAUGGUGCACCUGACUCCUGGUUUUAGAGCUAGAAAUAGC
AAGUUAAAAUAAGGCUAGUCCGUUAUCAACUUGAAAAAGU
GGGACCGAGUCGGUGCAGACUUCUCCACAGGAGUCAGGUG
CAC-3′.
In some embodiments, the ngRNA comprises
the sequence of
(SEQ ID NO: 564)
5′-mC*mC*mU*UGAUACCAACCUGCCCAGUUUUAGAGCUAGAAA
UAGCAAGUUAAAAUAAGGCUAGUCCGUUAUCAACUUGAAAAAGUG
GGACCGAGUCGGUGCmU*mU*mU*U-3′.
In some embodiments, the ngRNA comprises
the sequence of
(SEQ ID NO: 565)
5′-
CCUUGAUACCAACCUGCCCAGUUUUAGAGCUAGAAAUAGC
AAGUUAAAAUAAGGCUAGUCCGUUAUCAACUUGAAAAAGU
GGGACCGAGUCGGUGCUUUU-3′.
In some embodiments, the ngRNA comprises
the sequence of
(SEQ ID NO: 566)
5′-
mC*mC*mU*UGAUACCAACCUGCCCAGUUUUAGAGCUAGAAAUAGCAAG
UUAAAAUAAGGCUAGUCCGUUAUCAACUUGAAAAAGUGGG
ACCGAGUCGGUGC-3′.
In some embodiments, the ngRNA comprises
the sequence of
(SEQ ID NO: 567)
5′-
mC*mC*mU*UGAUACCAACCUGCCCAGUUUUAGAGCUAGAAAUAGCAAG
UUAAAAUAAGGCUAGUCCGUUAUCAACUUGAAAAAGUGGG
ACCGAGUCGGmU*mG*mC*- 3′.
In some embodiments, the ngRNA comprises
the sequence of
(SEQ ID NO: 568)
5′-
CCUUGAUACCAACCUGCCCAGUUUUAGAGCUAGAAAUAGC
AAGUUAAAAUAAGGCUAGUCCGUUAUCAACUUGAAAAAGU
GGGACCGAGUCGGUGC-3′.
In some embodiments, the PERNA comprises
the sequence of
(SEQ ID NO: 569)
5′-
mC*mA*mU*GGUGCACCUGACUCCUGGUUUUAGAGCUAGAAAUAG
CAAGUUAAAAUAAGGCUAGUCCGUUAUCAACUUGAAAAAGUGGC
ACCGAGUCGGUGCAGACUUCUCUUCAGGAGUCAGGUGCAC
mU*mU*mU*U-3′.
In some embodiments, the PEgRNA comprises
the sequence of
(SEQ ID NO: 570)
5′-
CAUGGUGCACCUGACUCCUGGUUUUAGAGCUAGAAAUAGC
AAGUUAAAAUAAGGCUAGUCCGUUAUCAACUUGAAAAAGU
GGCACCGAGUCGGUGCAGACUUCUCUUCAGGAGUCAGGUG
CACUUUU-3′.
In some embodiments, the PEgRNA comprises
the sequence of
(SEQ ID NO: 571)
5′-
mC*mA*mU*GGUGCACCUGACUCCUGGUUUUAGAGCUAGAAAUAGCAAG
UUAAAAUAAGGCUAGUCCGUUAUCAACUUGAAAAAGUGGC
ACCGAGUCGGUGCAGACUUCUCUUCAGGAGUCAGGUGCAC
-3′.
In some embodiments, the PEgRNA comprises
the sequence of
(SEQ ID NO: 572)
5′-mC*mA*mU*GGUGCACCUGACUCCUGGUUUUAGAGCUAGAAAUAG
CAAGUUAAAAUAAGGCUAGUCCGUUAUCAACUUGAAAAAGUGGC
ACCGAGUCGGUGCAGACUUCUCUUCAGGAGUCAGGUGmC*mA*mC*- 3′.
In some embodiments, the PEgRNA comprises
the sequence of
(SEQ ID NO: 573)
5′-
CAUGGUGCACCUGACUCCUGGUUUUAGAGCUAGAAAUAGC
AAGUUAAAAUAAGGCUAGUCCGUUAUCAACUUGAAAAAGU
GGCACCGAGUCGGUGCAGACUUCUCUUCAGGAGUCAGGUG
CAC-3′.
In some embodiments, the ngRNA comprises
the sequence of
(SEQ IDNO: 574)
5′-
mC*mC*mU*UGAUACCAACCUGCCCAGUUUUAGAGCUAGAAAUAGC
AAGUUAAAAUAAGGCUAGUCCGUUAUCAACUUGAAAAAGUGGC
ACCGAGUCGGUGCmU*mU*mU*U-3′.
In some embodiments, the ngRNA comprises
the sequence of
(SEQ ID NO: 575)
5′-
CCUUGAUACCAACCUGCCCAGUUUUAGAGCUAGAAAUAGC
AAGUUAAAAUAAGGCUAGUCCGUUAUCAACUUGAAAAAGU
GGCACCGAGUCGGUGCUUUU-3′.
In some embodiments, the ngRNA comprises
the sequence of
(SEQ ID NO: 576)
5′-
mC*mC*mU*UGAUACCAACCUGCCCAGUUUUAGAGCUAGAAAUAG
CAAGUUAAAAUAAGGCUAGUCCGUUAUCAACUUGAAAAAGUGGC
ACCGAGUCGGUGC-3′.
In some embodiments, the ngRNA comprises
the sequence of
(SEQ ID NO: 577)
5′-
mC*mC*mU*UGAUACCAACCUGCCCAGUUUUAGAGCUAGAAAUAGC
AAGUUAAAAUAAGGCUAGUCCGUUAUCAACUUGAAAAAGUGGC
ACCGAGUCGGmU*mG*mC*- 3′.
In some embodiments, the ngRNA comprises
the sequence of
(SEQ ID NO: 578)
5′-
CCUUGAUACCAACCUGCCCAGUUUUAGAGCUAGAAAUAGC
AAGUUAAAAUAAGGCUAGUCCGUUAUCAACUUGAAAAAGU
GGCACCGAGUCGGUGC-3′.
In some embodiments, the PEgRNA comprises
the sequence of
(SEQ ID NO: 579)
5′-mC*mA*mU*GGUGCACCUGACUCCUGGUUUUAGAGCUAGAAAU
AGCAAGUUAAAAUAAGGCUAGUCCGUUAUCAACUUGAAAAAGUGGC
ACCGAGUCGGUGCAGACUUCUCUACAGGAGUCAGGUGCAC
mU*mU*mU*U-3′.
In some embodiments, the PEgRNA comprises
the sequence of
(SEQ ID NO: 580)
5′-
CAUGGUGCACCUGACUCCUGGUUUUAGAGCUAGAAAUAGC
AAGUUAAAAUAAGGCUAGUCCGUUAUCAACUUGAAAAAGU
GGCACCGAGUCGGUGCAGACUUCUCUACAGGAGUCAGGUG
CACUUUU-3′.
In some embodiments, the PEgRNA comprises
the sequence of
(SEQ ID NO: 581)
5′-
mC*mA*mU*GGUGCACCUGACUCCUGGUUUUAGAGCUAGAAAUAGC
AAGUUAAAAUAAGGCUAGUCCGUUAUCAACUUGAAAAAGUGGC
ACCGAGUCGGUGCAGACUUCUCUACAGGAGUCAGGUGCAC
-3′.
In some embodiments, the PEgRNA comprises
the sequence of
(SEQ ID NO: 582)
5′-
mC*mA*mU*GGUGCACCUGACUCCUGGUUUUAGAGCUAGAAAUAGCAAG
UUAAAAUAAGGCUAGUCCGUUAUCAACUUGAAAAAGUGGC
ACCGAGUCGGUGCAGACUUCUCUACAGGAGUCAGGUGmC*mA*mC*-3′.
In some embodiments, the PEgRNA comprises
the sequence of
(SEQ ID NO: 583)
5′-
CAUGGUGCACCUGACUCCUGGUUUUAGAGCUAGAAAUAGC
AAGUUAAAAUAAGGCUAGUCCGUUAUCAACUUGAAAAAGU
GGCACCGAGUCGGUGCAGACUUCUCUACAGGAGUCAGGUG
CAC-3′.
In some embodiments, the nick guide RNA (ngRNA)
comprises the sequence of
(SEQ IDNO: 574)
5′-
mC*mC*mU*UGAUACCAACCUGCCCAGUUUUAGAGCUAGAAAUAGCAAG
UUAAAAUAAGGCUAGUCCGUUAUCAACUUGAAAAAGUGGC
ACCGAGUCGGUGCmU*mU*mU*U-3′.
In some embodiments, the nick guide RNA (ngRNA)
coprises the sequence of
(SEQ ID NO: 575)
5′-
CCUUGAUACCAACCUGCCCAGUUUUAGAGCUAGAAAUAGC
AAGUUAAAAUAAGGCUAGUCCGUUAUCAACUUGAAAAAGU
GGCACCGAGUCGGUGCUUUU-3′.
In some embodiments, the nick guide RNA (ngRNA)
comprises the sequence of
(SEQ ID NO: 576)
5′-
mC*mC*mU*UGAUACCAACCUGCCCAGUUUUAGAGCUAGAAAUAGCAAG
UUAAAAUAAGGCUAGUCCGUUAUCAACUUGAAAAAGUGGC
ACCGAGUCGGUGC-3′.
In some embodiments, the nick guide RNA (ngRNA)
comprises the sequence of
(SEQ ID NO: 577)
5′-
mC*mC*mU*UGAUACCAACCUGCCCAGUUUUAGAGCUAGAAAUAGCAAG
UUAAAAUAAGGCUAGUCCGUUAUCAACUUGAAAAAGUGGC
ACCGAGUCGGmU*mG*mC-3′.
In some embodiments, the nick guide RNA
(ngRNA) coprises the sequence of
(SEQ ID NO: 578)
5′-
CCUUGAUACCAACCUGCCCAGUUUUAGAGCUAGAAAUAGC
AAGUUAAAAUAAGGCUAGUCCGUUAUCAACUUGAAAAAGU
GGCACCGAGUCGGUGC-3′.
In some embodiments, the PEgRNA comprises
the sequence of
(SEQ ID NO: 579)
5′-
mC*mA*mU*GGUGCACCUGACUCCUGGUUUUAGAGCUAGAAAUA
GCAAGUUAAAAUAAGGCUAGUCCGUUAUCAACUUGAAAAAGUGGC
ACCGAGUCGGUGCAGACUUCUCUACAGGAGUCAGGUGCAC
mU*mU*mU*U-3′.
In some embodiments, the PEgRNA comprises
the sequence of
(SEQ ID NO: 580)
5′-
CAUGGUGCACCUGACUCCUGGUUUUAGAGCUAGAAAUAGC
AAGUUAAAAUAAGGCUAGUCCGUUAUCAACUUGAAAAAGU
GGCACCGAGUCGGUGCAGACUUCUCUACAGGAGUCAGGUG
CACUUUU-3′.
In some embodiments, the PEgRNA comprises
the sequence of
(SEQ ID NO: 581)
5′-
mC*mA*mU*GGUGCACCUGACUCCUGGUUUUAGAGCUAGAAAUAG
CAAGUUAAAAUAAGGCUAGUCCGUUAUCAACUUGAAAAAGUGGC
ACCGAGUCGGUGCAGACUUCUCUACAGGAGUCAGGUGCAC
-3′.
In some embodiments, the PEgRNA comprises
the sequence of
(SEQ ID NO: 582)
5′-
mC*mA*mU*GGUGCACCUGACUCCUGGUUUUAGAGCUAGAAAUAGCAAG
UUAAAAUAAGGCUAGUCCGUUAUCAACUUGAAAAAGUGGC
ACCGAGUCGGUGCAGACUUCUCUACAGGAGUCAGGUGmC*mA*mC*-3′.
In some embodiments, the PEgRNA comprises
the sequence of
(SEQ ID NO: 583)
5′-
CAUGGUGCACCUGACUCCUGGUUUUAGAGCUAGAAAUAGC
AAGUUAAAAUAAGGCUAGUCCGUUAUCAACUUGAAAAAGU
GGCACCGAGUCGGUGCAGACUUCUCUACAGGAGUCAGGUG
CAC-3′.
In some embodiments, the nick guide RNA
(ngRNA) comprises the sequence of
(SEQ IDNO: 574)
5′-
mC*mC*mU*UGAUACCAACCUGCCCAGUUUUAGAGCUAGAAAUAG
CAAGUUAAAAUAAGGCUAGUCCGUUAUCAACUUGAAAAAGUGGC
ACCGAGUCGGUGCmU*mU*mU*U-3′.
In some embodiments, the nick guide RNA
(ngRNA) comprises the sequence of
(SEQ ID NO: 575)
5′-
CCUUGAUACCAACCUGCCCAGUUUUAGAGCUAGAAAUAGC
AAGUUAAAAUAAGGCUAGUCCGUUAUCAACUUGAAAAAGU
GGCACCGAGUCGGUGCUUUU-3′.
In some embodiments, the nick guide RNA (ngRNA)
comprises the sequence of
(SEQ ID NO: 576)
5′-mC*mC*mU*UGAUACCAACCUGCCCAGUUUUAGAGCUAGAAAU
AGCAAGUUAAAAUAAGGCUAGUCCGUUAUCAACUUGAAAAAGUGGC
ACCGAGUCGGUGC-3′.
In some embodiments, the nick guide RNA
(ngRNA) comprises the sequence of
(SEQ ID NO: 577)
5′-
mC*mC*mU*UGAUACCAACCUGCCCAGUUUUAGAGCUAGAAAUAGC
AAGUUAAAAUAAGGCUAGUCCGUUAUCAACUUGAAAAAGUGGC
ACCGAGUCGGmU*mG*mC*- 3′.
In some embodiments, the nick guide RNA (ngRNA)
comprises the sequence of
(SEQ ID NO: 578)
5′-
CCUUGAUACCAACCUGCCCAGUUUUAGAGCUAGAAAUAGC
AAGUUAAAAUAAGGCUAGUCCGUUAUCAACUUGAAAAAGU
GGCACCGAGUCGGUGC-3′.
In some embodiments, the PEgRNA comprises
the sequence of
(SEQ ID NO: 579)
5′-
mC*mA*mU*GGUGCACCUGACUCCUGGUUUUAGAGCUAGAAAUAG
CAAGUUAAAAUAAGGCUAGUCCGUUAUCAACUUGAAAAAGUGGC
ACCGAGUCGGUGCAGACUUCUCUACAGGAGUCAGGUGCAC
mU*mU*mU*U-3′.
In some embodiments, the PEgRNA comprises
the sequence of
(SEQ ID NO: 580)
5′-
CAUGGUGCACCUGACUCCUGGUUUUAGAGCUAGAAAUAGC
AAGUUAAAAUAAGGCUAGUCCGUUAUCAACUUGAAAAAGU
GGCACCGAGUCGGUGCAGACUUCUCUACAGGAGUCAGGUG
CACUUUU-3′.
In some embodiments, the PEgRNA comprises
the sequence of
(SEQ ID NO: 581)
5′-
mC*mA*mU*GGUGCACCUGACUCCUGGUUUUAGAGCUAGAAAU
AGCAAGUUAAAAUAAGGCUAGUCCGUUAUCAACUUGAAAAAGU
GGCACCGAGUCGGUGCAGACUUCUCUACAGGAGUCAGGUGCAC
-3′.
In some embodiments, the PEgRNA comprises the
sequence of
(SEQ ID NO: 582)
5′-
mC*mA*mU*GGUGCACCUGACUCCUGGUUUUAGAGCUAGAAAUAGC
AAGUUAAAAUAAGGCUAGUCCGUUAUCAACUUGAAAAAGUGGC
ACCGAGUCGGUGCAGACUUCUCUACAGGAGUCAGGUGmC*mA*mC*-3′.
In some embodiments, the PEgRNA
comprises the sequence of
(SEQ ID NO: 583)
5′-
CAUGGUGCACCUGACUCCUGGUUUUAGAGCUAGAAAUAGC
AAGUUAAAAUAAGGCUAGUCCGUUAUCAACUUGAAAAAGU
GGCACCGAGUCGGUGCAGACUUCUCUACAGGAGUCAGGUG
CAC-3′.
In some embodiments, the nick guide RNA
(ngRNA) comprises the sequence of
(SEQ ID NO: 574)
5′-
mC*mC*mU*UGAUACCAACCUGCCCAGUUUUAGAGCUAGAAAUA
GCAAGUUAAAAUAAGGCUAGUCCGUUAUCAACUUGAAAAAGUGG
CACCGAGUCGGUGCmU*mU*mU*U-3′.
In some embodiments, the nick guide RNA
(ngRNA) comprises the sequence of
(SEQ ID NO: 575)
5′-
CCUUGAUACCAACCUGCCCAGUUUUAGAGCUAGAAAUAGC
AAGUUAAAAUAAGGCUAGUCCGUUAUCAACUUGAAAAAGU
GGCACCGAGUCGGUGCUUUU-3′.
In some embodiments, the nick guide RNA
(ngRNA) comprises the sequence of
(SEQ ID NO: 576)
5′-
mC*mC*mU*UGAUACCAACCUGCCCAGUUUUAGAGCUAGAAAUA
GCAAGUUAAAAUAAGGCUAGUCCGUUAUCAACUUGAAAAAGUGG
CACCGAGUCGGUGC-3′.
In some embodiments, the nick guide RNA
(ngRNA) comprises the sequence of
(SEQ ID NO: 577)
5′-
mC*mC*mU*UGAUACCAACCUGCCCAGUUUUAGAGCUAGAAAUAG
CAAGUUAAAAUAAGGCUAGUCCGUUAUCAACUUGAAAAAGUGGC
ACCGAGUCGGmU*mG*mC*-3′.
In some embodiments, the nick guide RNA
(ngRNA) comprises the sequence of
(SEQ ID NO: 578)
5′-
CCUUGAUACCAACCUGCCCAGUUUUAGAGCUAGAAAUAGC
AAGUUAAAAUAAGGCUAGUCCGUUAUCAACUUGAAAAAGU
GGCACCGAGUCGGUGC-3′.
In some embodiments, the DNA encoding the
PEgRNA comprises the sequence of
(SEQ ID NO: 584)
5′-
GCATGGTGCACCTGACTCCTGGTTTTAGAGCTAGAAATAG
CAAGTTAAAATAAGGCTAGTCCGTTATCAACTTGAAAAAG
TGGGACCGAGTCGGTGCAGACTTCTCCACAGGAGTCAGGT
GCACTTTTTTT-3′.
In some embodiments, the DNA encoding the
PEgRNA comprises the sequence of
(SEQ ID NO: 585)
5′-
GCATGGTGCACCTGACTCCTGGTTTTAGAGCTAGAAATAG
CAAGTTAAAATAAGGCTAGTCCGTTATCAACTTGAAAAAG
TGGGACCGAGTCGGTGCAGACTTCTCTACAGGAGTCAGGT
GCACTTTTTTT-3′.
In some embodiments, the DNA encoding the nick
guide RNA (ngRNA) comprises the sequence of
(SEQ ID NO: 586)
5′-GCCTTGATACCAACCTGCCCAGTTTTAGAGCTAGAAATAG
CAAGTTAAAATAAGGCTAGTCCGTTATCAACTTGAAAAAGTGG
GACCGAGTCGGTGCTTTTTTT-3′.

### Prime Editing Compositions

[0393] Disclosed herein, in some embodiments, are compositions, systems, and methods using a prime editing composition. The term “prime editing composition” or “prime editing system” refers to compositions involved in the method of prime editing as described herein. A prime editing composition may include a prime editor, e.g., a prime editor fusion protein, and a PEgRNA. A prime editing composition may further comprise additional elements, such as second strand nicking ngRNAs. Components of a prime editing composition may be combined to form a complex for prime editing, or may be kept separately, e.g., for administration purposes. In some embodiments, a prime editing composition comprises a prime editor fusion protein complexed with a PEgRNA and optionally complexed with a ngRNA. In some embodiments, the prime editing composition comprises a prime editor comprising a DNA binding domain and a DNA polymerase domain associated with each other through a PEgRNA. For example, the prime editing composition may comprise a prime editor comprising a DNA binding domain and a DNA polymerase domain linked to each other by an RNA-protein recruitment aptamer RNA sequence, which is linked to a PEgRNA. In some embodiments, a prime editing composition comprises a PEgRNA and a polynucleotide, a polynucleotide construct, or a vector that encodes a prime editor fusion protein. In some embodiments, a prime editing composition comprises a PEgRNA, a ngRNA, and a polynucleotide, a polynucleotide construct, or a vector that encodes a prime editor fusion protein. In some embodiments, a prime editing composition comprises multiple polynucleotides, polynucleotide constructs, or vectors, each of which encodes one or more prime editing composition components. In some embodiments, the PEgRNA of a prime editing composition is associated with the DNA binding domain, e.g., a Cas9 nickase, of the prime editor. In some embodiments, the PEgRNA of a prime editing composition complexes with the DNA binding domain of a prime editor and directs the prime editor to the target DNA.

[0394] In some embodiments, a prime editing composition comprises one or more polynucleotides that encode prime editor components and/or PEgRNA or ngRNAs. In some embodiments, a prime editing composition comprises a polynucleotide encoding a fusion protein comprising a DNA binding domain and a DNA polymerase domain. In some embodiments, a prime editing composition comprises (i) a polynucleotide encoding a fusion protein comprising a DNA binding domain and a DNA polymerase domain, and (ii) a PEgRNA or a polynucleotide encoding the PEgRNA. In some embodiments, a prime editing composition comprises (i) a polynucleotide encoding a fusion protein comprising a DNA binding domain and a DNA polymerase domain, (ii) a PEgRNA or a polynucleotide encoding the PEgRNA, and (iii) an ngRNA or a polynucleotide encoding the ngRNA. In some embodiments, a prime editing composition comprises (i) a polynucleotide encoding a DNA binding domain of a prime editor, e.g., a Cas9 nickase, (ii) a polynucleotide encoding a DNA polymerase domain of a prime editor, e.g., a reverse transcriptase, and (iii) a PEgRNA or a polynucleotide encoding the PEgRNA. In some embodiments, a prime editing composition comprises (i) a polynucleotide encoding a DNA binding domain of a prime editor, e.g., a Cas9 nickase, (ii) a polynucleotide encoding a DNA polymerase domain of a prime editor, e.g., a reverse transcriptase, (iii) a PEgRNA or a polynucleotide encoding the PEgRNA, and (iv) an ngRNA or a polynucleotide encoding the ngRNA. In some embodiments, the polynucleotide encoding the DNA biding domain or the polynucleotide encoding the DNA polymerase domain further encodes an additional polypeptide domain, e.g., an RNA-protein recruitment domain, such as a MS2 coat protein domain. In some embodiments, a prime editing composition comprises (i) a polynucleotide encoding a N-terminal half of a prime editor fusion protein and an intein-N and (ii) a polynucleotide encoding a C-terminal half of a prime editor fusion protein and an intein-C. In some embodiments, a prime editing composition comprises (i) a polynucleotide encoding a N-terminal half of a prime editor fusion protein and an intein-N (ii) a polynucleotide encoding a C-terminal half of a prime editor fusion protein and an intein-C, (iii) a PEgRNA or a polynucleotide encoding the PEgRNA, and/or (iv) an ngRNA or a polynucleotide encoding the ngRNA. In some embodiments, a prime editing composition comprises (i) a polynucleotide encoding a N-terminal portion of a DNA binding domain and an intein-N, (ii) a polynucleotide encoding a C-terminal portion of the DNA binding domain, an intein-C, and a DNA polymerase domain. In some embodiments, the DNA binding domain is a Cas protein domain, e.g., a Cas9 nickase. In some embodiments, the prime editing composition comprises (i) a polynucleotide encoding a N-terminal portion of a DNA binding domain and an intein-N, (ii) a polynucleotide encoding a C-terminal portion of the DNA binding domain, an intein-C, and a DNA polymerase domain, (iii) a PEgRNA or a polynucleotide encoding the PEgRNA, and/or (iv) a ngRNA or a polynucleotide encoding the ngRNA.

[0395] In some embodiments, a prime editing system comprises one or more polynucleotides encoding one or more prime editor polypeptides, wherein activity of the prime editing system can be temporally regulated by controlling the timing in which the vectors are delivered. For example, in some embodiments, a polynucleotide encoding the prime editor and a polynucleotide encoding a PEgRNA can be delivered simultaneously. For example, in some embodiments, a polynucleotide encoding the prime editor and a polynucleotide encoding a PEgRNA can be delivered sequentially.

### Polynucleotides Encoding Prime Editor Components

[0396] Polynucleotides encoding prime editing composition components can be DNA, RNA, or any combination thereof. In some embodiments, a polynucleotide encoding a prime editing composition component is an expression construct. In some embodiments, a polynucleotide encoding a prime editing composition component is a vector. In some embodiments, the vector is a DNA vector. In some embodiments, the vector is a plasmid. In some embodiments, the vector is a virus vector, e.g., a retroviral vector, adenoviral vector, lentiviral vector, herpesvirus vector, or an adeno-associated virus vector (AAV).

[0397] In some embodiments, polynucleotides encoding polypeptide components of a prime editing composition are codon optimized for improved expression. Codon optimization can refer to engineering a polynucleotide sequence for enhanced expression in a host cell of interest, by replacing at least one codon (e.g., about or more than about 1, 2, 3, 4, 5, 10, 15, 20, 25, 50, or more codons) of the native polynucleotide sequence with codons that are more frequently or most frequently used in the genes of that host cell while maintaining the native amino acid sequence. In some embodiments, codon optimization engineers a polynucleotide sequence for enhanced expression by altering GC content of the polynucleotide sequence to increase mRNA stability in the host cell.

[0398] In some embodiments, codon optimization minimizes tandem repeat codons or tandem repeat nucleobase runs that may impair gene construction or expression. Codon optimization may also include customizing transcriptional and translational control regions, inserting or removing protein trafficking sequences, removing or adding post translation modification sites in encoded proteins (e.g., glycosylation sites), adding, removing or shuffling protein domains, inserting or deleting restriction sites, and/or modifying ribosome binding sites and mRNA degradation sites to enhance expression and proper folding of the prime editor polypeptide in the host cell.

[0399] In some embodiments, a polynucleotide encoding a prime editor polypeptide, e.g., a DNA sequence or mRNA sequence, is codon optimized, e.g., for expression in a cell of a specific species. Various species exhibit particular bias for certain codons of a particular amino acid. In some embodiments, the polynucleotide can be optimized for increased expression in cells of a specific species, using a codon usage table. Codon usage tables are readily available to those skilled in the art, for example, in Nakamura, Y., et al. “Codon usage tabulated from the international DNA sequence databases: status for the year 2000” Nucl. Acids Res. 28:292 (2000). Computer algorithms for codon optimizing a particular sequence for expression in a particular host cell are also available, such as GeneArt (Life Technologies), or DNA2.0 (Menlo Park, CA).

[0400] In some embodiments, a polynucleotide encoding a prime editor polypeptide, e.g., a DNA sequence or mRNA sequence, is codon optimized for expression in a desired cell from specific species, e.g., in bacterial cell, plant cell, insect cell, or mammalian cell. In some embodiments, the codon optimization is for expression in a eukaryotic cell. In some embodiments, the codon optimization is for expression in a mammalian cell. In some embodiments, the codon optimization is for expression in a human cell. In some embodiments, a polynucleotide encoding a prime editor polypeptide is codon optimized for expression in a desire cell type. In some embodiments, the codon optimization is for expression in a hematopoietic stem cell (HSC). In some embodiments, the codon optimization is for expression in a CD34⁺ HSC. In some embodiments, the codon optimization is for expression in a human hematopoietic stem cell (HSC). In some embodiments, the codon optimization is for expression in a human CD34⁺ HSC. In some embodiments, the codon optimization is for expression in a human CD34⁺ hematopoietic stem progenitor cell (HSPC). In some embodiments, the codon optimization is for expression in hepatocytes, fibroblasts, keratinocytes, epithelial cells (e.g., mammary epithelial cells, intestinal epithelial cells), endothelial cells, glial cells, neural cells, formed elements of the blood (e.g., lymphocytes, bone marrow cells, hematopoietic stem progenitor cells), muscle cells and precursors of these somatic cell types. In some embodiments, the codon optimization is for expression in primary hepatocytes. In some embodiments, the codon optimization is for expression in pluripotent stem cells (iPSCs). In some embodiments, the codon optimization is for expression in neurons. In some embodiments, the codon optimization is for expression in basal ganglia. the codon optimization is for expression in epithelial cells from lung, liver, stomach, or intestine. the codon optimization is for expression in retinal cells.

[0401] In some embodiments, codon optimization engineers a polynucleotide sequence for enhanced expression by altering secondary structure to enhance expression in the host cell. “Secondary structure” refers to the three-dimensional form of local segments of a biopolymer, such as a polynucleotide. In some embodiments, a secondary structure may be formed in a polynucleotide molecule, e.g., a DNA or an RNA molecule. In some embodiments, a secondary structure in a polynucleotide is formed by base pairing of complementary nucleotide sequences within a single polynucleotide molecule. In some embodiments, a secondary structure in a polynucleotide comprises one or more double-stranded regions through base pairing of complementary nucleotide sequences within a single polynucleotide molecule. In some embodiments, the secondary structure of a polynucleotide, e.g., a DNA or mRNA, comprises a hairpin, a stem, a loop, a tetraloop, a pseudoknot, a stem-loop, or any combination thereof. In some embodiments, when a polynucleotide contains an altered secondary structure as compared to a reference polynucleotide, the polynucleotide has a reduced or increased degree of secondary structure compared to the reference polynucleotide. Degree of secondary structure can be measured by the percentage of nucleotides of a polynucleotide that form complementary base pairs within the same polynucleotide.

[0402] In some embodiments, an optimized polynucleotide sequence, e.g., a mRNA encoding a prime editor fusion protein, exhibits an increased degree of secondary structure compared to a reference polynucleotide sequence, e.g., an unaltered reference mRNA encoding a PE protein. In some embodiments, a reference sequence is a wild-type polynucleotide sequence encoding all or a portion of a prime editor protein. In some embodiments, a reference sequence is a polynucleotide sequence encoding a functional variant of all or a portion of a prime editor protein, the reference sequence being altered from the wild type polynucleotide sequence only to encode one or more amino acid substitutions in of the functional variant. An exemplary reference polynucleotide sequence encoding the PE protein is provided in SEQ ID NOs: 26, 27, 32, 33. In some embodiments, a codon optimized polynucleotide sequence exhibits a reduced degree of secondary structure compared to a reference polynucleotide sequence. In some embodiments, a codon optimized polynucleotide comprises a reduced number of inverted repeat motifs compared to a reference polynucleotide sequence. In some embodiments, a codon optimized polynucleotide sequence exhibits an increased degree of secondary structure compared to a reference polynucleotide sequence. In some embodiments, a codon optimized polynucleotide comprises an increased number of inverted repeat motifs compared to a reference polynucleotide sequence.

[0403] In some embodiments, a codon optimized polynucleotide exhibits an altered degree of secondary structure in a specific portion as compared to a reference polynucleotide sequence. In some embodiments, a codon optimized polynucleotide exhibits a reduced degree of secondary structure in a specific portion as compared to a reference polynucleotide sequence. In some embodiments, the codon optimized polynucleotide exhibits an altered degree of secondary structure in an open reading frame (ORF) compared to a reference polynucleotide sequence. In some embodiments, the codon optimized polynucleotide exhibits a reduced degree of secondary structure in a ribosome binding site at the 5′ region of an ORF compared to a reference polynucleotide sequence. In some embodiments, the codon optimized polynucleotide exhibits a reduced degree of secondary structure at the N terminus of the ORF compared to a reference polynucleotide sequence. In some embodiments, the codon optimized polynucleotide exhibits a reduced degree of secondary structure at the C terminus of the ORF compared to a reference polynucleotide sequence. In some embodiments, a codon optimized polynucleotide sequence exhibits an increased secondary structure in a specific portion as compared to a reference polynucleotide sequence. In some embodiments, the codon optimized polynucleotide exhibits an increased degree of secondary structure in an open reading frame (ORF) compared to a reference polynucleotide sequence. In some embodiments, the codon optimized polynucleotide exhibits an increased degree of secondary structure at the N terminus of the ORF compared to a reference polynucleotide sequence. In some embodiments, the codon optimized polynucleotide exhibits an increased degree of secondary structure at the C terminus of the ORF compared to a reference polynucleotide sequence. In some embodiments, the codon optimized polynucleotide (e.g. mRNA) that encodes a prime editor polypeptide exhibits an increased degree of secondary structure compared to a reference coding sequence, e.g., of a SpCas9 or a M-MLV RT. In some embodiments, the codon optimized polynucleotide (e.g. mRNA) that encodes a prime editor polypeptide exhibits an increased secondary structure in an open reading frame (ORF) compared to the reference coding sequence, e.g., of a SpCas9 or a M-MLV RT. In some embodiments, the codon optimized polynucleotide (e.g., mRNA) that encodes a prime editor polypeptide exhibits secondary structure(s) that increase stability of the polynucleotide. In some embodiments, the codon optimized polynucleotide (e.g., mRNA) that encodes a prime editor polypeptide exhibits secondary structure(s) that increase initiation of polypeptide synthesis at or from an initiation codon. In some embodiments, the codon optimized polynucleotide (e.g., mRNA) that encodes a prime editor polypeptide exhibits secondary structure(s) that inhibit or reduce of the amount of polypeptide translated from any ORF within the polynucleotide other than the full ORF, thereby increasing translational fidelity of the prime editor polypeptide. In some embodiments, the secondary structure improves stability of the polynucleotide, e.g., mRNA, or a mRNA encoded by the polynucleotide. In some embodiments, the secondary structure improves thermostability of the polynucleotide, e.g., mRNA, or a mRNA encoded by the polynucleotide.

[0404] Optimized polynucleotides that encode prime editor polypeptide or components are provided.

[0405] In some embodiments, a prime editor comprises a DNA binding domain (e.g., a Cas9) that is encoded by a polynucleotide comprising a nucleic acid sequence that is at least about 85%, 86%, 87%, 88%, 89%, 90%, 91%, 92%, 93%, 94%, 95%, 96%, 97%, 98%, or 99% identical to the nucleic acid sequence of SEQ ID NO: 627 or SEQ ID NO: 629 (e.g., a DNA polynucleotide) or to the nucleic acid sequence of SEQ ID NO: 628, or SEQ ID NO: 630 (e.g., an RNA polynucleotide). In some embodiments, a prime editor comprises a DNA binding domain (e.g., a Cas9) that is encoded by a polynucleotide comprising a nucleic acid sequence that is selected from the group consisting of SEQ ID NO: 627, or SEQ ID NO: 629 or from the group consisting of SEQ ID NO: 628, or SEQ ID NO: 630.

[0406] In some embodiments, a prime editor comprises a DNA polymerase domain that is encoded by a polynucleotide comprising a nucleic acid sequence that is at least about 85%, 86%, 87%, 88%, 89%, 90%, 91%, 92%, 93%, 94%, 95%, 96%, 97%, 98%, or 99% identical to a nucleic acid sequence selected from any of SEQ ID NOs. 28, 41, 50, 59, 68, 83, 91, 245, or 257 (e.g., a DNA polynucleotide) or to the nucleic acid sequence of SEQ ID NOs: 29, 42, 51, 60, 69, 84, 92, 246, or 258 (e.g., an RNA polynucleotide). In some embodiments, a prime editor comprises a DNA polymerase domain that is encoded by a polynucleotide comprising a nucleic acid sequence that is selected from the group consisting of any of SEQ ID NOs. 28, 41, 50, 59, 68, 83, 91, 245, or 257 (e.g., a DNA polynucleotide) or from the group consisting of any of SEQ ID NOs. 29, 42, 51, 60, 69, 84, 92, 246, or 258 (e.g., an RNA polynucleotide). In some embodiments, a prime editor comprises a DNA polymerase domain that is encoded by a polynucleotide that is codon optimized. In some embodiments, a prime editor comprises a DNA polymerase domain that is encoded by a polynucleotide comprising a nucleic acid sequence that is at least about 85%, 86%, 87%, 88%, 89%, 90%, 91%, 92%, 93%, 94%, 95%, 96%, 97%, 98%, or 99% identical to a nucleic acid sequence selected from any of SEQ ID NOs. 83 or 91, (e.g., a DNA polynucleotide) or to the nucleic acid sequence of SEQ ID NOs: 84 or 92 (e.g., an RNA polynucleotide). In some embodiments, a prime editor comprises a DNA polymerase domain that is encoded by a polynucleotide comprising a nucleic acid sequence that is selected from the group consisting of any of SEQ ID NOs. 83 or 91 (e.g., a DNA polynucleotide) or from the group consisting of any of SEQ ID NOs. 84 or 92 (e.g., an RNA polynucleotide).

[0407] In some embodiments, a prime editor comprises a linker that is encoded by a polynucleotide comprising a nucleic acid sequence that is at least about 85%, 86%, 87%, 88%, 89%, 90%, 91%, 92%, 93%, 94%, 95%, 96%, 97%, 98%, or 99% identical to a nucleic acid sequence selected from any of SEQ ID NOs: 235, 247, 259, 633, or 635 (e.g., a DNA polynucleotide) or to the nucleic acid sequence selected from any of SEQ ID NO: 236, 248, 260, 634, or 636 (e.g., an RNA polynucleotide). In some embodiments, a prime editor comprises a linker that is encoded by a polynucleotide that is selected from the group consisting of SEQ ID NO: 235, 247, 259, 633, or 635 or from the group consisting of SEQ ID NO:236, 248, 260, 634, or 636. In some embodiments, a prime editor comprises a linker that is encoded by a polynucleotide that is codon optimized.

[0408] In some embodiments, a prime editor comprises one or more NLS that is encoded by a polynucleotide comprising a nucleic acid sequence that is at least about 85%, 86%, 87%, 88%, 89%, 90%, 91%, 92%, 93%, 94%, 95%, 96%, 97%, 98%, or 99% identical to a nucleic acid sequence selected from any of SEQ ID NOs: 239, 251, 263, 631, or 637 (e.g., a DNA polynucleotide) or to a nucleic acid sequence of SEQ ID NO: 240, 252, 264, 632, or 638 (e.g., an RNA polynucleotide). In some embodiments, a prime editor comprises one or more NLS that is encoded by a polynucleotide that is selected from the group consisting of SEQ ID NO: 239, 251, 263, 631, or 637 or from the group consisting of SEQ ID NO: 240, 252, 264, 632, or 638. In some embodiments, a prime editor comprises an NLS that is encoded by a polynucleotide that is codon optimized.

[0409] In some embodiments, a prime editor comprises a DNA binding domain (e.g., a Cas9) that is encoded by a polynucleotide comprising a nucleic acid sequence that is at least about 85%, 86%, 87%, 88%, 89%, 90%, 91%, 92%, 93%, 94%, 95%, 96%, 97%, 98%, or 99% identical to the nucleic acid sequence of SEQ ID NO: 627 or SEQ ID NO: 629 (e.g., a DNA polynucleotide) or to the nucleic acid sequence of SEQ ID NO: 628, or SEQ ID NO: 630 (e.g., an RNA polynucleotide) and further comprises a DNA polymerase domain that is encoded by a polynucleotide comprising a nucleic acid sequence that is at least about 85%, 86%, 87%, 88%, 89%, 90%, 91%, 92%, 93%, 94%, 95%, 96%, 97%, 98%, or 99% identical to a nucleic acid sequence selected from any of SEQ ID NOs. 28, 41, 50, 59, 68, 83, 91, 245, or 257 (e.g., a DNA polynucleotide) or to the nucleic acid sequence of SEQ ID NOs: 29, 42, 51, 60, 69, 84, 92, 246, or 258 (e.g., an RNA polynucleotide) optionally wherein the prime editor further comprises a linker that is encoded by a polynucleotide comprising a nucleic acid sequence that is at least about 85%, 86%, 87%, 88%, 89%, 90%, 91%, 92%, 93%, 94%, 95%, 96%, 97%, 98%, or 99% identical to a nucleic acid sequence selected from any of SEQ ID NOs: 235, 247, 259, 633, or 635 (e.g., a DNA polynucleotide) or to the nucleic acid sequence selected from any of SEQ ID NO: 236, 248, 260, 634, or 636 (e.g., an RNA polynucleotide), optionally wherein the prime editor further comprises a NLS that is encoded by a polynucleotide comprising a nucleic acid sequence that is at least about 85%, 86%, 87%, 88%, 89%, 90%, 91%, 92%, 93%, 94%, 95%, 96%, 97%, 98%, or 99% identical to a nucleic acid sequence selected from any of SEQ ID NOs: 239, 251, 263, 631, or 637 (e.g., a DNA polynucleotide) or to a nucleic acid sequence of SEQ ID NO: 240, 252, 264, 632, or 638 (e.g., an RNA polynucleotide).

[0410] In some embodiments, a prime editor comprises a DNA binding domain (e.g., a Cas9) that is encoded by a polynucleotide comprising a nucleic acid sequence that is selected from the group consisting of SEQ ID NO: 627, or SEQ ID NO: 629 or from the group consisting of SEQ ID NO: 628, or SEQ ID NO: 630, further comprising a a DNA polymerase domain that is encoded by a polynucleotide comprising a nucleic acid sequence that is selected from the group consisting of any of SEQ ID NOs. 28, 41, 50, 59, 68, 83, 91, 245, or 257 (e.g., a DNA polynucleotide) or from the group consisting of any of SEQ ID NOs. 29, 42, 51, 60, 69, 84, 92, 246, or 258 (e.g., an RNA polynucleotide), optionally wherein the prime editor further comprises a linker that is encoded by a polynucleotide that is selected from the group consisting of SEQ ID NO: 235, 247, 259, 633, or 635 or from the group consisting of SEQ ID NO:236, 248, 260, 634, or 636, optionally wherein the prime editor further comprises one or more NLS that is encoded by a polynucleotide that is selected from the group consisting of SEQ ID NO: 239, 251, 263, 631, or 637 or from the group consisting of SEQ ID NO: 240, 252, 264, 632, or 638.

[0411] In some embodiments, a prime editor comprises a DNA binding domain (e.g., a Cas9) that is encoded by a polynucleotide comprising a nucleic acid sequence is selected from the group consisting of SEQ ID NO: 627, or SEQ ID NO: 629 (e.g., a DNA polynucleotide) or from the group consisting of SEQ ID NO: 628, or SEQ ID NO: 630, (e.g., a RNA polynucleotide) further comprising a DNA polymerase domain that is encoded by a polynucleotide comprising a nucleic acid sequence that is selected from the group consisting of any of SEQ ID NOs. 83, 91, 245, or 257 (e.g., a DNA polynucleotide) or from the group consisting of SEQ ID NO: 84, 92, 246, or 258, (e.g., a RNA polynucleotide) optionally wherein the prime editor further comprises a a linker that is encoded by a polynucleotide that is selected from the group consisting of SEQ ID NO: 235, 247, 259, 633, or 635 or from the group consisting of SEQ ID NO:236, 248, 260, 634, or 636, optionally wherein the prime editor further comprises one or more NLS that is encoded by a polynucleotide that is selected from the group consisting of SEQ ID NO: 239, 251, 263, 631, or 637 or from the group consisting of SEQ ID NO: 240, 252, 264, 632, or 638.

[0412] In some embodiments, a prime editor comprises a DNA binding domain (e.g., a Cas9) that is encoded by a polynucleotide comprising a nucleic acid sequence as set forth in SEQ ID NO: 627, (e.g., a DNA polynucleotide) or as set forth in SEQ ID NO: 629 (e.g., an RNA polynucleotide) further comprising a DNA polymerase domain that is encoded by a polynucleotide comprising a nucleic acid sequence as set forth in SEQ ID NO. 83 (e.g., a DNA polynucleotide) or as set forth in SEQ ID NO: 84 (e.g., a RNA polynucleotide) optionally wherein the prime editor further comprises a linker that is encoded by a polynucleotide that is selected from the group consisting of SEQ ID NO: 633, or 635 or from the group consisting of SEQ ID NO: 634, or 636, optionally wherein the prime editor further comprises one or more NLS that is encoded by a polynucleotide that is selected from the group consisting of SEQ ID NO: 631, or 637 or from the group consisting of SEQ ID NO: 632, or 638.

[0413] In some embodiments, a prime editor comprises a DNA binding domain (e.g., a Cas9) that is encoded by a polynucleotide comprising a nucleic acid sequence as set forth in SEQ ID NO: 629, (e.g., a DNA polynucleotide) or as set forth in SEQ ID NO: 630 (e.g., an RNA polynucleotide) further comprising a DNA polymerase domain that is encoded by a polynucleotide comprising a nucleic acid sequence as set forth in SEQ ID NO. 91 (e.g., a DNA polynucleotide) or as set forth in SEQ ID NO: 92 (e.g., a RNA polynucleotide) optionally wherein the prime editor further comprises a linker that is encoded by a polynucleotide that is selected from the group consisting of SEQ ID NO: 633, or 635 or from the group consisting of SEQ ID NO: 634, or 636, optionally wherein the prime editor further comprises one or more NLS that is encoded by a polynucleotide that is selected from the group consisting of SEQ ID NO: 631, or 637 or from the group consisting of SEQ ID NO: 632, or 638.

[0414] In some embodiments, a prime editor comprises a DNA binding domain (e.g., a Cas9) that is encoded by a polynucleotide comprising a nucleic acid sequence as set forth in SEQ ID NO: 627 or 629, (e.g., a DNA polynucleotide) or as set forth in SEQ ID NO: 628 or 630 (e.g., an RNA polynucleotide) further comprising a DNA polymerase domain that is encoded by a polynucleotide comprising a nucleic acid sequence as set forth in SEQ ID NOs. 83 or 91 (e.g., a DNA polynucleotide) or as set forth in SEQ ID NO: 84 or 92 (e.g., a RNA polynucleotide) optionally wherein the prime editor further comprises a linker that is encoded by a polynucleotide that is selected a sequence as set forth in SEQ ID NO: 233, or as set forth in SEQ ID NO:236, optionally wherein the prime editor further comprises one or more NLS that is encoded by a polynucleotide as set forth in SEQ ID NO: 239, 631, or 637 or as set forth in SEQ ID NO: 240.

[0415] In some embodiments, a prime editing composition comprises a polynucleotide that encodes a prime editor that comprises an amino acid sequence that is at least about 85%, at least 86%, at least 87%, at least 88%, at least 89%, at least 90%, at least 91%, at least 92%, at least 93%, at least 94%, at least 95%, at least 96%, at least 97%, at least 98%, at least 99% identical to any one of the sequences set forth in SEQ ID NO: 25, 34, 35, 43, 44, 52, 53, 61, 62, 63, 70-78, 85, 86, 93, 96, 99, 104, 105, 110, 111, 116, 117, 122, 125, 128, 131, 134, 137, 140, 143, 146, 149, 152, 155, 158, 161, 164, 170, 176, 179, 182, 185, 188, 191, 194, 197, 200, 203, 206, 209, 212, 215, 218, 221, 224, 227, 230, 620, 622, 624, or 625. In some embodiments, a prime editing composition comprises a polynucleotide that encodes a prime editor that comprises an amino acid sequence selected from any one of SEQ ID NOs: 25, 34, 35, 43, 44, 52, 53, 61, 62, 63, 70-78, 85, 86, 93, 96, 99, 104, 105, 110, 111, 116, 117, 122, 125, 128, 131, 134, 137, 140, 143, 146, 149, 152, 155, 158, 161, 164, 170, 176, 179, 182, 185, 188, 191, 194, 197, 200, 203, 206, 209, 212, 215, 218, 221, 224, 227, 230, 620, 622, 624, or 625 (Tables 15-66). In some embodiments, the polynucleotide encoding a prime editor is a DNA polynucleotide. In some embodiments, the polynucleotide encoding a prime editor is an RNA polynucleotide (e.g., a mRNA). In some embodiments, a polynucleotide (e.g., a DNA polynucleotide) encoding a prime editor comprises a nucleic acid sequence that is at least about 85%, at least 86%, at least 87%, at least 88%, at least 89%, at least 90%, at least 91%, at least 92%, at least 93%, at least 94%, at least 95%, at least 96%, at least 97%, at least 98%, at least 99% identical to any one of the sequences set forth in 26, 30, 32, 34, 37, 39, 46, 48, 55, 57, 64, 66, 79, 81, 87, 89, 94, 97, 100, 102, 106, 108, 112, 114, 118, 120, 123, 126, 129, 132, 135, 138, 141, 144, 147, 150, 153, 156, 159, 162, 165, 168, 171, 174, 177, 180, 183, 186, 189, 192, 195, 198, 201, 204, 207, 210, 213, 216, 219, 222, 225, 228, 231, 233, 241, 243, 253, 255, 263, or 265 (Tables 15-66) or to one of the sequences set forth in SEQ ID NO: 27, 31, 33, 35, 38, 40, 47, 49, 56, 58, 65, 67, 79, 82, 88, 90, 95, 98, 101, 103, 107, 109, 113, 115, 119, 121, 124, 127, 130, 133, 136, 139, 142, 145, 148, 151, 154, 157, 160, 163, 166, 169, 172, 175, 178, 181, 184, 187, 190, 193, 196, 199, 202, 205, 208, 211, 214, 217, 220, 223, 226, 229, 232, 234, 242, 244, 254, 256, 264, or 266 (Tables 15-66). In some embodiments, a polynucleotide (e.g., a DNA polynucleotide) encoding a prime editor comprises a nucleic acid sequence that is selected from any one of SEQ ID NOs. 26, 30, 32, 34, 37, 39, 46, 48, 55, 57, 64, 66, 79, 81, 87, 89, 94, 97, 100, 102, 106, 108, 112, 114, 118, 120, 123, 126, 129, 132, 135, 138, 141, 144, 147, 150, 153, 156, 159, 162, 165, 168, 171, 174, 177, 180, 183, 186, 189, 192, 195, 198, 201, 204, 207, 210, 213, 216, 219, 222, 225, 228, 231, 233, 241, 243, 253, 255, 263, or 265 (Tables 15-66) (e.g., a DNA polynucleotide) or is selected from any one of SEQ ID NOs. SEQ ID NO: 27, 31, 33, 35, 38, 40, 47, 49, 56, 58, 65, 67, 79, 82, 88, 90, 95, 98, 101, 103, 107, 109, 113, 115, 119, 121, 124, 127, 130, 133, 136, 139, 142, 145, 148, 151, 154, 157, 160, 163, 166, 169, 172, 175, 178, 181, 184, 187, 190, 193, 196, 199, 202, 205, 208, 211, 214, 217, 220, 223, 226, 229, 232, 234, 242, 244, 254, 256, 264, or 266 (Tables 15-66) (e.g., an RNA polynucleotide).

[0416] In some embodiments, a polynucleotide encoding a prime editor comprises a nucleic acid sequence that is at least about 85%, at least 86%, at least 87%, at least 88%, at least 89%, at least 90%, at least 91%, at least 92%, at least 93%, at least 94%, at least 95%, at least 96%, at least 97%, at least 98%, at least 99% identical to any one of the sequences set forth in SEQ ID NOs:79, 81, 87, 89, or 233 (e.g., a DNA polynucleotide) or to any one of the sequences set forth in SEQ ID NOs:80, 82, 88, 90, or 234 (e.g., an RNA polynucleotide).). In some embodiments, a polynucleotide (e.g., an RNA polynucleotide) encoding a prime editor comprises a nucleic acid sequence that is selected from any one of SEQ ID NOs: 79, 81, 87, 89, or 233 (e.g., a DNA polynucleotide) or is selected from any one of SEQ ID NO: 80, 82, 88, 90, or 234 (e.g., an RNA polynucleotide).

[0417] In some embodiments, a polynucleotide encoding a prime editor comprises a nucleic acid sequence that is at least about 85%, at least 86%, at least 87%, at least 88%, at least 89%, at least 90%, at least 91%, at least 92%, at least 93%, at least 94%, at least 95%, at least 96%, at least 97%, at least 98%, at least 99% identical to any of sequences set forth in SEQ ID NOs:79 or 81, (e.g., a DNA polynucleotide) or any of sequences set forth in SEQ ID NOs:80 or 82. In some embodiments, a polynucleotide (e.g., an RNA polynucleotide) encoding a prime editor comprises a nucleic acid sequence that is selected from any one of SEQ ID NOs: 79 or 81 (e.g., a DNA polynucleotide) or is selected from any one of SEQ ID NO: 80 or 82 (e.g., an RNA polynucleotide).

[0418] In some embodiments, a polynucleotide encoding a prime editor comprises a nucleic acid sequence that is at least about 85%, at least 86%, at least 87%, at least 88%, at least 89%, at least 90%, at least 91%, at least 92%, at least 93%, at least 94%, at least 95%, at least 96%, at least 97%, at least 98%, at least 99% identical to any of sequences set forth in SEQ ID NOs: 88 or 90, (e.g., a DNA polynucleotide) or any of sequences set forth in SEQ ID NOs:88 or 90. In some embodiments, a polynucleotide (e.g., an RNA polynucleotide) encoding a prime editor comprises a nucleic acid sequence that is selected from any one of SEQ ID NOs: 87 or 89, (e.g., a DNA polynucleotide) or is selected from any one of SEQ ID NO: 88 or 90 (e.g., an RNA polynucleotide).

[0419] In some embodiments, the polynucleotide comprises a sequence selected from the group consisting of SEQ ID Nos: 79, 80, 94, 95, 106, 107, 118, and 119. In some embodiments, the polynucleotide comprises a sequence having at least 50%, at least 55%, at least 60%, at least 65%, at least 70%, at least 75%, at least 80%, at least 85%, at least 90%, at least 95%, or at least 99% identity to a sequence selected from the group consisting of SEQ ID Nos: 79, 80, 94, 95, 106, 107, 118, and 119. In some embodiments, the polynucleotide comprises a sequence having at least 80%, at least 85%, at least 91%, at least 92%, at least 93%, at least 94%, at least 95%, at least 96%, at least 97%, at least 98%, at least 99%, or at least 99.9% identity to a sequence selected from the group consisting of SEQ ID Nos: 79, 80, 94, 95, 106, 107, 118, and 119.

[0420] In some embodiments, the polynucleotide comprises a sequence selected from the group consisting of SEQ ID Nos: 87, 88, 97, 98, 100, 101, 112, and 113. In some embodiments, the polynucleotide comprises a sequence having at least 50%, at least 55%, at least 60%, at least 65%, at least 70%, at least 75%, at least 80%, at least 85%, at least 90%, at least 95%, or at least 99% identity to a sequence selected from the group consisting of SEQ ID Nos: 87, 88, 97, 98, 100, 101, 112, and 113. In some embodiments, the polynucleotide comprises a sequence having at least 80%, at least 85%, at least 91%, at least 92%, at least 93%, at least 94%, at least 95%, at least 96%, at least 97%, at least 98%, at least 99%, or at least 99.9% identity to a sequence selected from the group consisting of SEQ ID Nos: 87, 88, 97, 98, 100, 101, 112, and 113.

[0421] In some embodiments, the polynucleotide comprises a sequence selected from the group consisting of SEQ ID Nos: 274-285 or 592-595. In some embodiments, the polynucleotide comprises a sequence having at least 50%, at least 55%, at least 60%, at least 65%, at least 70%, at least 75%, at least 80%, at least 85%, at least 90%, at least 95%, or at least 99% identity to a sequence selected from the group consisting of SEQ ID Nos: 274-285 or 592-595. In some embodiments, the polynucleotide comprises a sequence having at least 80%, at least 85%, at least 91%, at least 92%, at least 93%, at least 94%, at least 95%, at least 96%, at least 97%, at least 98%, at least 99%, or at least 99.9% identity to a sequence selected from the group consisting of SEQ ID Nos: 274-285 or 592-595.

[0422] In some embodiments, provided herein are prime editing compositions comprising one or more polynucleotides encoding one or more prime editor components. In some embodiments, a prime editing composition comprises a polynucleotide encoding a DNA binding domain. In some embodiments, a prime editing composition comprises a polynucleotide encoding a DNA polymerase domain, e.g., a RT domain. In some embodiments, a prime editing composition comprises a polynucleotide, e.g., a fusion polynucleotide, that comprises the polynucleotide encoding a DNA binding domain and the polynucleotide encoding a DNA polymerase domain, e.g., the RT domain. In some embodiments, the prime editing composition comprises a polynucleotide encoding a DNA polymerase domain, wherein the polynucleotide comprises a sequence having at least 80% identity to a sequence selected from the group consisting of SEQ ID Nos 412-555. In some embodiments, the prime editing composition comprises a polynucleotide encoding a DNA polymerase domain, wherein the polynucleotide comprises a sequence having at least 80% identity to a sequence corresponding to nucleotides 100-2130 of a sequence selected from the group consisting of SEQ ID Nos 412-555. In some embodiments, the prime editing composition comprises a polynucleotide encoding a DNA polymerase domain, wherein the polynucleotide comprises a sequence having at least about 81%, 82%, 83%, 84%, 85%, 86%, 87%, 88%, 80%, 90%, 91%, 92%, 93%, 94%, 95%, 96%, 97%, 98%, 99%, or 100% identity to a sequence corresponding to nucleotides 100-2130 of a sequence selected from the group consisting of SEQ ID Nos 412-555. In some embodiments, the prime editing composition comprises a polynucleotide encoding a DNA polymerase domain, wherein the polynucleotide comprises a sequence having at least 80% identity to SEQ ID No 83 or 84. In some embodiments, the prime editing composition comprises a polynucleotide encoding a DNA polymerase domain, wherein the polynucleotide comprises a sequence having at least about 81%, 82%, 83%, 84%, 85%, 86%, 87%, 88%, 80%, 90%, 91%, 92%, 93%, 94%, 95%, 96%, 97%, 98%, 99%, or 100% identity to SEQ ID No 83 or 84. In some embodiments, the prime editing composition comprises a polynucleotide encoding a DNA polymerase domain, wherein the polynucleotide comprises the sequence of SEQ ID No 83 or 84.

[0423] In some embodiments, a prime editing composition comprises a polynucleotide encoding a DNA polymerase domain, wherein the polynucleotide comprises a sequence having at least 80% identity to SEQ ID No 91 or 92. In some embodiments, the prime editing composition comprises a polynucleotide encoding a DNA polymerase domain, wherein the polynucleotide comprises a sequence having at least about 81%, 82%, 83%, 84%, 85%, 86%, 87%, 88%, 80%, 90%, 91%, 92%, 93%, 94%, 95%, 96%, 97%, 98%, 99%, or 100% identity to SEQ ID No 91 or 92. In some embodiments, the prime editing composition comprises a polynucleotide encoding a DNA polymerase domain, wherein the polynucleotide comprises the sequence of SEQ ID No 91 or 92.

[0424] In some embodiments, the prime editing composition comprises a polynucleotide encoding a DNA binding domain. In some embodiments, the polynucleotide encoding the DNA binding domain comprises a sequence having at least about 80%, 81%, 82%, 83%, 84%, 85%, 86%, 87%, 88%, 80%, 90%, 91%, 92%, 93%, 94%, 95%, 96%, 97%, 98%, 99%, or 100% identity to SEQ ID Nos 627-630. In some embodiments, the polynucleotide encoding the DNA binding domain comprises the sequence of SEQ ID No 627, 628, 629, or 630.

[0425] In some embodiments, a polynucleotide, e.g., a fusion polynucleotide encoding a prime editor comprising a nucleic acid sequence comprising a first polynucleotide encoding a DNA binding domain, a second polynucleotide encoding a DNA polymerase domain, optionally further comprising a third polynucleotide encoding a linker and optionally further comprising a fourth polynucleotide encoding an NLS. In some embodiments, a polynucleotide, e.g., a fusion polynucleotide encoding a prime editor comprises a nucleic acid sequence comprising a first polynucleotide encoding a DNA polymerase domain, a second polynucleotide encoding a DNA binding domain, optionally further comprising a third polynucleotide domain encoding a linker and optionally further comprising a fourth polynucleotide domain encoding an NLS. In some embodiments, the third polynucleotide sequence is located between the first and the second polynucleotide sequence. In some embodiments, the sequence encoding the NLS (e.g., fourth polynucleotide) is at the 5′ end terminus of the sequence encoding the DNA binding domain. In some embodiments, the sequence encoding the NLS (e.g., fourth polynucleotide) is at the 5′ end terminus of the sequence encoding the DNA polymerase domain. In some embodiments, the sequence encoding the NLS (e.g., fourth polynucleotide) is at the 3′ end terminus of the sequence encoding the DNA binding domain. In some embodiments, the sequence encoding the NLS (e.g., fourth polynucleotide) is at the 3′ end terminus of the sequence encoding the DNA polymerase domain. In some embodiments, a polynucleotide, e.g., a fusion polynucleotide encoding a prime editor comprising a nucleic acid sequence comprises two or more nucleotide sequences that encode two or more NLSs. In some embodiments, a polynucleotide, e.g., a fusion polynucleotide encoding a prime editor comprising a nucleic acid sequence comprises two or more nucleotide sequences that encode two or more NLS at the 3′ end. In some embodiments, a polynucleotide, e.g., a fusion polynucleotide encoding a prime editor comprising a nucleic acid sequence comprises two or more nucleotide sequences that encode two or more NLS at the 5′ end. In some embodiments, a polynucleotide, e.g., a fusion polynucleotide encoding a prime editor comprising a nucleic acid sequence comprises at least two nucleotide sequences that encode at least one NLS at the 3′ end and at least one NLS at the 5′ end. In some embodiments, the NLS is encoded by a polynucleotide comprising a sequence as set forth in SEQ ID Nos 239, 240, 251, 252, 263, and 264.

[0426] In some embodiments, a prime editing composition comprises a first polynucleotide encoding a DNA binding domain and a second polynucleotide encoding a DNA polymerase domain, wherein the first and the second polynucleotides are connected to form a fusion polynucleotide. In some embodiments, the first and the second polynucleotides are connected by a polynucleotide sequence that encodes a peptide linker. In some embodiments, the polynucleotide sequence that encodes a peptide linker comprises a sequence having at least about 80%, 81%, 82%, 83%, 84%, 85%, 86%, 87%, 88%, 80%, 90%, 91%, 92%, 93%, 94%, 95%, 96%, 97%, 98%, 99%, or 100% identity to SEQ ID Nos 235 or 236. In some embodiments, the polynucleotide sequence that encodes a peptide linker comprises the sequence of SEQ ID Nos 235 or 236. In some embodiments, the fusion polynucleotide comprises the first and the second polynucleotides from 5′ to 3′. In some embodiments, the fusion polynucleotide comprises the first and the second polynucleotides from 3′ to 5′. In some embodiments, the fusion polynucleotide comprises a sequence having at least about 80%, 81%, 82%, 83%, 84%, 85%, 86%, 87%, 88%, 80%, 90%, 91%, 92%, 93%, 94%, 95%, 96%, 97%, 98%, 99%, or 100% identity to a sequence selected from the group consisting of SEQ ID NOs: 81, 82, 108, 109, 120, 121, 126, 127, 132, 133, 138, 139, 144, 145, 150, 151, 156, 157, 162, 163, 168, 169, 174, 175, 180, 181, 186, 187, 192, 193, 198, 199, 204, 205, 210, 211, 216, 217, 222, 223, 228, 229, 241, and 242. In some embodiments, the fusion polynucleotide comprises a sequence selected from the group consisting of SEQ ID NOs: 81, 82, 108, 109, 120, 121, 126, 127, 132, 133, 138, 139, 144, 145, 150, 151, 156, 157, 162, 163, 168, 169, 174, 175, 180, 181, 186, 187, 192, 193, 198, 199, 204, 205, 210, 211, 216, 217, 222, 223, 228, 229, 241, and 242. In some embodiments, the fusion polynucleotide comprises a sequence having at least about 80%, 81%, 82%, 83%, 84%, 85%, 86%, 87%, 88%, 80%, 90%, 91%, 92%, 93%, 94%, 95%, 96%, 97%, 98%, 99%, or 100% identity to SEQ ID NOs: 81 or 82. In some embodiments, the fusion polynucleotide comprises the sequence of SEQ ID NOs: 81 or 82. In some embodiments, the fusion polynucleotide comprises a sequence having at least about 80%, 81%, 82%, 83%, 84%, 85%, 86%, 87%, 88%, 80%, 90%, 91%, 92%, 93%, 94%, 95%, 96%, 97%, 98%, 99%, or 100% identity to SEQ ID NOs: 241 or 242. In some embodiments, the fusion polynucleotide comprises the sequence of SEQ ID NOs: 241 or 242.

[0427] In some embodiments, the fusion polynucleotide comprises a sequence having at least about 80%, 81%, 82%, 83%, 84%, 85%, 86%, 87%, 88%, 80%, 90%, 91%, 92%, 93%, 94%, 95%, 96%, 97%, 98%, 99%, or 100% identity to a sequence selected from the group consisting of SEQ ID NOs: 89, 90, 102, 103, 114, 115, 123, 124, 129, 130, 135, 136, 141, 142, 147, 148, 153, 154, 159, 160, 165, 166, 171, 172, 177, 178, 183, 184, 189, 190, 195, 196, 201, 202, 207, 208, 213, 214, 219, 220, 225, 226, 231, and 232. In some embodiments, the fusion polynucleotide comprises a sequence selected from the group consisting of SEQ ID NOs: 89, 90, 102, 103, 114, 115, 123, 124, 129, 130, 135, 136, 141, 142, 147, 148, 153, 154, 159, 160, 165, 166, 171, 172, 177, 178, 183, 184, 189, 190, 195, 196, 201, 202, 207, 208, 213, 214, 219, 220, 225, 226, 231, and 232. In some embodiments, the fusion polynucleotide comprises a sequence having at least about 80%, 81%, 82%, 83%, 84%, 85%, 86%, 87%, 88%, 80%, 90%, 91%, 92%, 93%, 94%, 95%, 96%, 97%, 98%, 99%, or 100% identity to SEQ ID NOs: 89 or 90. In some embodiments, the fusion polynucleotide comprises the sequence of SEQ ID NOs: 89 or 90. In some embodiments, the fusion polynucleotide comprises a sequence having at least about 80%, 81%, 82%, 83%, 84%, 85%, 86%, 87%, 88%, 80%, 90%, 91%, 92%, 93%, 94%, 95%, 96%, 97%, 98%, 99%, or 100% identity to SEQ ID NOs: 102 or 103. In some embodiments, the fusion polynucleotide comprises the sequence of SEQ ID NOs: 102 or 103. In some embodiments, the fusion polynucleotide comprises a sequence having at least about 80%, 81%, 82%, 83%, 84%, 85%, 86%, 87%, 88%, 80%, 90%, 91%, 92%, 93%, 94%, 95%, 96%, 97%, 98%, 99%, or 100% identity to SEQ ID NOs: 114 or 115. In some embodiments, the fusion polynucleotide comprises the sequence of SEQ ID NOs: 114 or 115.

[0428] In some embodiments, the first polynucleotide, the second polynucleotide, or the fusion polynucleotide further comprises a sequence encoding one or more nuclear localization signals (NLSs). In some embodiments, the sequence encoding the NLS is at the 5′ end terminus of the first polynucleotide. In some embodiments, the sequence encoding the NLS is at the 3′ end terminus of the first polynucleotide. In some embodiments, the sequence encoding the NLS is at the 5′ end terminus of the second polynucleotide. In some embodiments, the sequence encoding the NLS is at the 3′ end terminus of the second polynucleotide. In some embodiments, the sequence encoding the NLS is between the first and the second polynucleotides. In some embodiments, the first polynucleotide, the second polynucleotide, both comprise comprises two or more sequences that encode two or more NLSs. The prime editing composition of any one of preceding claims, wherein the first polynucleotide and the second polynucleotide are connected, and wherein the first polynucleotide comprises a sequence encoding a NLS at the 5′ end and wherein the second polynucleotide comprises a sequence encoding a NLS at the 3′ end.

[0429] In some embodiments, the first polynucleotide and the second polynucleotide are connected, and wherein the first polynucleotide comprises a sequence encoding two or more NLSs at the 5′ end and/or wherein the second polynucleotide comprises a sequence encoding two or more NLSs at the 3′ end. In some embodiments, the NLS or the two or more NLSs comprise a bipartite NLS (BPNLS). In some embodiments, the BPNLS is a bipartite SV40 NLS or a bipartite Xenopus nucleoplasmin NLS. In some embodiments, the BPNLS comprises an amino acid sequence selected from the group consisting of SEQ ID Nos 4-24. In some embodiments, the NLS is encoded by a polynucleotide comprising a sequence as set forth in SEQ ID Nos 239, 240, 251, 252, 263, and 264. In some embodiments, the sequence encoding the NLS comprises the sequence of SEQ ID No 239 or 240 and is connected to the 3′ end of the second polynucleotide.

[0430] In some embodiments, the fusion polynucleotide comprises a sequence having at least about 80%, 81%, 82%, 83%, 84%, 85%, 86%, 87%, 88%, 80%, 90%, 91%, 92%, 93%, 94%, 95%, 96%, 97%, 98%, 99%, or 100% identity to a sequence selected from the group consisting of SEQ ID NOs: 79, 80, 94, 95, 106, 107, 118, 119, 233, and 234. In some embodiments, the fusion polynucleotide comprises the sequence of SEQ ID NOs: 79, 80, 94, 95, 106, 107, 118, 119, 233, or 234.

[0431] In some embodiments, the fusion polynucleotide comprises a sequence having at least about 80%, 81%, 82%, 83%, 84%, 85%, 86%, 87%, 88%, 80%, 90%, 91%, 92%, 93%, 94%, 95%, 96%, 97%, 98%, 99%, or 100% identity to a sequence of SEQ ID NO 79 or 80. In some embodiments, the fusion polynucleotide comprises the sequence of SEQ ID NO 79 or 80.

[0432] In some embodiments, the fusion polynucleotide comprises a sequence having at least about 80%, 81%, 82%, 83%, 84%, 85%, 86%, 87%, 88%, 80%, 90%, 91%, 92%, 93%, 94%, 95%, 96%, 97%, 98%, 99%, or 100% identity to a sequence selected from the group consisting of SEQ ID NOs: 87, 88, 97, 98, 100, 101, 112, and 113. [0465]. In some embodiments, the fusion polynucleotide comprises the sequence of SEQ ID NOs: 87, 88, 97, 98, 100, 101, 112, or 113.

[0433] In some embodiments, the fusion polynucleotide comprises a sequence having at least about 80%, 81%, 82%, 83%, 84%, 85%, 86%, 87%, 88%, 80%, 90%, 91%, 92%, 93%, 94%, 95%, 96%, 97%, 98%, 99%, or 100% identity to the sequence of SEQ ID NO 87 or 88. In some embodiments, the fusion polynucleotide comprises the sequence of SEQ ID NO 87 or 88.

[0434] In some embodiments, the fusion polypeptide further comprises a stop codon at the 3′ end. In some embodiments, the stop codon comprises a sequence selected from the group consisting of SEQ ID Nos 269-272. In some embodiments, the stop codon comprises a sequence selected from the group consisting of sequences UAA, UAG, UGA, and UAAUAGUGA. In some embodiments, the stop codon comprises a DNA or RNA sequence of any stop codon known in the art.

[0435] In some embodiments, the fusion polynucleotide comprises a sequence having at least about 80%, 81%, 82%, 83%, 84%, 85%, 86%, 87%, 88%, 80%, 90%, 91%, 92%, 93%, 94%, 95%, 96%, 97%, 98%, 99%, or 100% identity to a sequence selected from the group consisting of SEQ ID Nos 276-279. In some embodiments, the fusion polynucleotide comprises a sequence selected from the group consisting of SEQ ID Nos 276-279. In some embodiments, the fusion polynucleotide comprises a sequence having at least about 80%, 81%, 82%, 83%, 84%, 85%, 86%, 87%, 88%, 80%, 90%, 91%, 92%, 93%, 94%, 95%, 96%, 97%, 98%, 99%, or 100% identity to a sequence selected from the group consisting of SEQ ID Nos 282-285. In some embodiments, the fusion polynucleotide comprises a sequence selected from the group consisting of SEQ ID Nos 282-285.

[0436] In some embodiments, the fusion polynucleotide further comprises a 5′ untranslated region sequence (5′ UTR) or a 3′ untranslated region sequence (3′ UTR).

[0437] In some embodiments, the fusion polynucleotide comprises a sequence having at least about 80%, 81%, 82%, 83%, 84%, 85%, 86%, 87%, 88%, 80%, 90%, 91%, 92%, 93%, 94%, 95%, 96%, 97%, 98%, 99%, or 100% identity to a sequence selected from the group consisting of SEQ ID Nos 274, 275, 592, and 593. In some embodiments, the fusion polynucleotide comprises a sequence selected from the group consisting of SEQ ID Nos 274, 275, 592, and 593. In some embodiments, the fusion polynucleotide comprises a sequence having at least about 80%, 81%, 82%, 83%, 84%, 85%, 86%, 87%, 88%, 80%, 90%, 91%, 92%, 93%, 94%, 95%, 96%, 97%, 98%, 99%, or 100% identity to a sequence selected from the group consisting of SEQ ID Nos 280, 281, 594, or 595. In some embodiments, the fusion polynucleotide comprises a sequence selected from the group consisting of SEQ ID Nos 280, 281, 594, or 595.

[0438] In some embodiments, the first polynucleotide, the second polynucleotide, or the fusion polynucleotide comprises DNA. In some embodiments, the first polynucleotide, the second polynucleotide, or the fusion polynucleotide comprises a regulatory element. In some embodiments, the regulatory element is a promoter. In some embodiments, the first polynucleotide, the second polynucleotide, or the fusion polynucleotide comprises comprise RNA. In some embodiments, the first polynucleotide, the second polynucleotide, or the fusion polynucleotide comprises comprise mRNA.

[0439] A polynucleotide, e.g., a DNA or mRNA, that encodes a protein domain described herein can be obtained by chemically synthesizing the DNA, or by connecting synthesized partly overlapping oligoDNA short chains by utilizing the PCR method and the Gibson Assembly method to construct a DNA encoding the full length thereof. The advantage of constructing a full-length DNA by chemical synthesis or a combination of PCR method or Gibson Assembly method is that the codon to be used can be designed in CDS full-length according to the host into which the DNA is introduced. In the expression of a heterologous DNA, the protein expression level is expected to increase by converting the DNA sequence thereof to a codon highly frequently used in the host organism. As the data of codon use frequency in host to be used, for example, the genetic code use frequency database (http://www.kazusa.or.jp/codon/index.html) disclosed in the home page of Kazusa DNA Research Institute can be used, or documents showing the codon use frequency in each host may be referred to. By reference to the obtained data and the DNA sequence to be introduced, codons showing low use frequency in the host from among those used for the DNA sequence may be converted to a codon coding the same amino acid and showing high use frequency.

[0440] In some embodiments, a polynucleotide encoding a polypeptide component of a prime editing composition are operably linked to one or more expression regulatory elements, for example, a promoter, a 3′ UTR, a 5′ UTR, or any combination thereof. In some embodiments, a polynucleotide encoding a prime editing composition component is a messenger RNA (mRNA). In some embodiments, the mRNA comprises a Cap at the 5′ end and/or a poly A tail at the 3′ end.

### Pharmaceutical Compositions

[0441] Disclosed herein are pharmaceutical compositions comprising any of the prime editing composition components, for example, prime editors, fusion proteins, polynucleotides encoding prime editor polypeptides, PEgRNAs, ngRNAs, and/or prime editing complexes described herein.

[0442] The term “pharmaceutical composition”, as used herein, refers to a composition formulated for pharmaceutical use. In some embodiments, the pharmaceutical composition further comprises a pharmaceutically acceptable carrier. In some embodiments, the pharmaceutical composition comprises additional agents, e.g., for specific delivery, increasing half-life, or other therapeutic compounds.

[0443] In some embodiments, a pharmaceutically acceptable carrier comprises any vehicle, such as a liquid or solid filler, diluent, excipient, manufacturing aid (e.g., lubricant, tale magnesium, calcium or zinc stearate, or steric acid), or solvent encapsulating material, involved in carrying or transporting the compound from one site (e.g., the delivery site) of the body, to another site (e.g., organ, tissue or portion of the body). A pharmaceutically acceptable carrier is “acceptable” in the sense of being compatible with the other ingredients of the formulation and not injurious to the tissue of the subject (e.g., physiologically compatible, sterile, physiologic pH, etc.) Formulations of the pharmaceutical compositions described herein can be prepared by any method known or hereafter developed in the art of pharmacology. In general, such preparatory methods include the step of bringing the active ingredient(s) into association with an excipient and/or one or more other accessory ingredients, and then, if necessary and/or desirable, shaping and/or packaging the product into a desired single- or multi-dose unit. Pharmaceutical formulations can additionally comprise a pharmaceutically acceptable excipient, which, as used herein, includes any and all solvents, dispersion media, diluents, or other liquid vehicles, dispersion or suspension aids, surface active agents, isotonic agents, thickening or emulsifying agents, preservatives, solid binders, lubricants, and the like, as suited to the particular dosage form desired.

### Methods of Editing

[0444] The methods and compositions disclosed herein can be used to edit a double stranded target DNA, e.g., a target gene of interest by prime editing.

[0445] In some embodiments, the prime editing method comprises contacting a double stranded target DNA, e.g., a target gene, with a PEgRNA and a prime editor (PE) polypeptide described herein. In some embodiments, the double stranded target DNA, e.g., a target gene is double stranded, and comprises two strands of DNA complementary to each other. In some embodiments, the contacting with a PEgRNA and the contacting with a prime editor are performed sequentially. In some embodiments, the contacting with a prime editor is performed after the contacting with a PEgRNA. In some embodiments, the contacting with a PEgRNA is performed after the contacting with a prime editor. In some embodiments, the contacting with a PEgRNA, and the contacting with a prime editor are performed simultaneously. In some embodiments, the PEgRNA and the prime editor are associated in a complex prior to contacting a double stranded target DNA, e.g., a target gene.

[0446] In some embodiments, contacting the double stranded target DNA, e.g., a target gene with the prime editing composition results in binding of the PEgRNA to a target strand of the double stranded target DNA, e.g., a target gene. In some embodiments, contacting the double stranded target DNA, e.g., a target gene with the prime editing composition results in binding of the PEgRNA to a search target sequence on the target strand of the double stranded target DNA, e.g., a target gene upon contacting with the PEgRNA. In some embodiments, contacting the double stranded target DNA, e.g., a target gene with the prime editing composition results in binding of a spacer sequence of the PEgRNA to a search target sequence with the search target sequence on the target strand of the double stranded target DNA, e.g., a target gene upon said contacting of the PEgRNA.

[0447] In some embodiments, contacting the double stranded target DNA, e.g., a target gene with the prime editing composition results in binding of the prime editor to the double stranded target DNA, e.g., a target gene, e.g., the double stranded target DNA, e.g., a target gene, upon the contacting of the PE composition with the double stranded target DNA, e.g., a target gene. In some embodiments, the DNA binding domain of the PE associates with the PEgRNA. In some embodiments, the PE binds the double stranded target DNA, e.g., a target gene, directed by the PEgRNA. Accordingly, in some embodiments, the contacting of the double stranded target DNA, e.g., a target gene result in binding of a DNA binding domain of a prime editor of the double stranded target DNA, e.g., a target gene, directed by the PEgRNA.

[0448] In some embodiments, contacting the double stranded target DNA, e.g., a target gene with the prime editing composition results in a nick in an edit strand of the double stranded target DNA, e.g., a target gene, by the prime editor upon contacting with the double stranded target DNA, e.g., a target gene, thereby generating a nicked on the edit strand of the double stranded target DNA, e.g., a target gene. In some embodiments, contacting the double stranded target DNA, e.g., a target gene with the prime editing composition results in a single-stranded DNA comprising a free 3′ end at the nick site of the edit strand of the double stranded target DNA, e.g., a target gene. In some embodiments, contacting the double stranded target DNA, e.g., a target gene with the prime editing composition results in a nick in the edit strand of the double stranded target DNA, e.g., a target gene by a DNA binding domain of the prime editor, thereby generating a single-stranded DNA comprising a free 3′ end at the nick site. In some embodiments, the DNA binding domain of the prime editor is a Cas domain. In some embodiments, the DNA binding domain of the prime editor is a Cas9. In some embodiments, the DNA binding domain of the prime editor is a Cas9 nickase.

[0449] In some embodiments, contacting the double stranded target DNA, e.g., a target gene with the prime editing composition results in hybridization of the PEgRNA with the 3′ end of the nicked single-stranded DNA, thereby priming DNA polymerization by a DNA polymerase domain of the prime editor. In some embodiments, the free 3′ end of the single-stranded DNA generated at the nick site hybridizes to a primer binding site sequence (PBS) of the contacted PEgRNA, thereby priming DNA polymerization. In some embodiments, the DNA polymerization is reverse transcription catalyzed by a reverse transcriptase domain of the prime editor. In some embodiments, the method comprises contacting the double stranded target DNA, e.g., a target gene with a DNA polymerase, e.g., a reverse transcriptase, as a part of a prime editor fusion protein or prime editing complex (in cis), or as a separate protein (in trans).

[0450] In some embodiments, contacting the double stranded target DNA, e.g., a target gene with the prime editing composition generates an edited single stranded DNA that is coded by the editing template of the PEgRNA by DNA polymerase mediated polymerization from the 3′ free end of the single-stranded DNA at the nick site. In some embodiments, the editing template of the PEgRNA comprises one or more intended nucleotide edits compared to endogenous sequence of the double stranded target DNA, e.g., a target gene. In some embodiments, the intended nucleotide edits are incorporated in the double stranded target DNA, e.g., a target gene, by excision of the 5′ single stranded DNA of the edit strand of the double stranded target DNA, e.g., a target gene generated at the nick site and DNA repair. In some embodiments, the intended nucleotide edits are incorporated in the double stranded target DNA, e.g., a target gene by excision of the editing target sequence and DNA repair. In some embodiments, excision of the 5′ single stranded DNA of the edit strand generated at the nick site is by a flap endonuclease. In some embodiments, the flap nuclease is FEN1. In some embodiments, the method further comprises contacting the double stranded target DNA, e.g., a target gene with a flap endonuclease. In some embodiments, the flap endonuclease is provided as a part of a prime editor fusion protein. In some embodiments, the flap endonuclease is provided in trans.

[0451] In some embodiments, contacting the double stranded target DNA, e.g., a target gene with the prime editing composition generates a mismatched heteroduplex comprising the edit strand of the double stranded target DNA, e.g., a target gene that comprises the edited single stranded DNA, and the unedited target strand of the double stranded target DNA, e.g., a target gene. Without being bound by theory, the endogenous DNA repair and replication may resolve the mismatched edited DNA to incorporate the nucleotide change(s) to form the desired edited double stranded target DNA, e.g., a target gene.

[0452] In some embodiments, the method further comprises contacting the double stranded target DNA, e.g., a target gene, with a nick guide (ngRNA) disclosed herein. In some embodiments, the ngRNA comprises a spacer that binds a second search target sequence on the edit strand of the double stranded target DNA, e.g., a target gene. In some embodiments, the contacted ngRNA directs the PE to introduce a nick in the target strand of the double stranded target DNA, e.g., a target gene. In some embodiments, the nick on the target strand (non-edit strand) results in endogenous DNA repair machinery to use the edit strand to repair the non-edit strand, thereby incorporating the intended nucleotide edit in both strand of the double stranded target DNA, e.g., a target gene and modifying the double stranded target DNA, e.g., a target gene. In some embodiments, the ngRNA comprises a spacer sequence that is complementary to, and may hybridize with, the second search target sequence on the edit strand only after the intended nucleotide edit(s) are incorporated in the edit strand of the double stranded target DNA, e.g., a target gene.

[0453] In some embodiments, the double stranded target DNA, e.g., a target gene is contacted by the ngRNA, the PEgRNA, and the PE simultaneously. In some embodiments, the ngRNA, the PEgRNA, and the PE form a complex when they contact the double stranded target DNA, e.g., a target gene. In some embodiments, the double stranded target DNA, e.g., a target gene is contacted with the ngRNA, the PEgRNA, and the prime editor sequentially. In some embodiments, the double stranded target DNA, e.g., a target gene is contacted with the ngRNA and/or the PEgRNA after contacting the double stranded target DNA, e.g., a target gene with the PE. In some embodiments, the double stranded target DNA, e.g., a target gene is contacted with the ngRNA and/or the PEgRNA before contacting the double stranded target DNA, e.g., a target gene with the prime editor.

[0454] In some embodiments, the double stranded target DNA, e.g., a target gene, is in a cell. Accordingly, also provided herein are methods of modifying a cell.

[0455] In some embodiments, the prime editing method comprises introducing a PEgRNA, a prime editor, and/or a ngRNA into the cell that has the double stranded target DNA, e.g., a target gene. In some embodiments, the prime editing method comprises introducing into the cell that has the double stranded target DNA, e.g., a target gene with a prime editing composition comprising a PEgRNA, a prime editor polypeptide, and/or a ngRNA. In some embodiments, the PEgRNA, the prime editor polypeptide, and/or the ngRNA form a complex prior to the introduction into the cell. In some embodiments, the PEgRNA, the prime editor polypeptide, and/or the ngRNA form a complex after the introduction into the cell. The prime editors, PEgRNA and/or ngRNAs, and prime editing complexes may be introduced into the cell by any delivery approaches described herein or any delivery approach known in the art, including ribonucleoprotein (RNPs), lipid nanoparticles (LNPs), viral vectors, non-viral vectors, mRNA delivery, and physical techniques such as cell membrane disruption by a microfluidics device. The prime editors, PEgRNA and/or ngRNAs, and prime editing complexes may be introduced into the cell simultaneously or sequentially.

[0456] In some embodiments, the prime editing method comprises introducing into the cell a PEgRNA or a polynucleotide encoding the PEgRNA, a prime editor polynucleotide encoding a prime editor polypeptide, and optionally an ngRNA or a polynucleotide encoding the ngRNA. In some embodiments, the method comprises introducing the PEgRNA or the polynucleotide encoding the PEgRNA, the polynucleotide encoding the prime editor polypeptide, and/or the ngRNA or the polynucleotide encoding the ngRNA into the cell simultaneously. In some embodiments, the method comprises introducing the PEgRNA or the polynucleotide encoding the PEgRNA, the polynucleotide encoding the prime editor polypeptide, and/or the ngRNA or the polynucleotide encoding the ngRNA into the cell sequentially. In some embodiments, the method comprises introducing the polynucleotide encoding the prime editor polypeptide into the cell before introduction of the PEgRNA or the polynucleotide encoding the PEgRNA and/or the ngRNA or the polynucleotide encoding the ngRNA. In some embodiments, the polynucleotide encoding the prime editor polypeptide is introduced into and expressed in the cell before introduction of the PEgRNA or the polynucleotide encoding the PEgRNA and/or the ngRNA or the polynucleotide encoding the ngRNA into the cell. In some embodiments, the polynucleotide encoding the prime editor polypeptide is introduced into the cell after the PEgRNA or the polynucleotide encoding the PEgRNA and/or the ngRNA or the polynucleotide encoding the ngRNA are introduced into the cell. The polynucleotide encoding the prime editor polypeptide, the PEgRNA or the polynucleotide encoding the PEgRNA, and/or the ngRNA or the polynucleotide encoding the ngRNA, may be introduced into the cell by any delivery approaches described herein or any delivery approach known in the art, for example, by RNPs, LNPs, viral vectors, non-viral vectors, mRNA delivery, and physical delivery.

[0457] In some embodiments, the polynucleotide encoding the prime editor polypeptide, the polynucleotide encoding the PEgRNA, and/or the polynucleotide encoding the ngRNA integrate into the genome of the cell after being introduced into the cell. In some embodiments, the polynucleotide encoding the prime editor polypeptide, the polynucleotide encoding the PEgRNA, and/or the polynucleotide encoding the ngRNA are introduced into the cell for transient expression. Accordingly, also provided herein are cells modified by prime editing.

[0458] In some embodiments, the cell is a prokaryotic cell. In some embodiments, the cell is a eukaryotic cell. In some embodiments, the cell is a mammalian cell. In some embodiments, the cell is a non-human primate cell, bovine cell, porcine cell, rodent or mouse cell. In some embodiments, the cell is a human cell. In some embodiments, the cell is a primary cell. In some embodiments, the cell is a human primary cell. In some embodiments, the cell is a progenitor cell. In some embodiments, the cell is a human progenitor cell. In some embodiments, the cell is a hepatocyte. In some embodiments, the cell is a human hepatocyte. In some embodiments, the cell is a primary human hepatocyte derived from an induced human pluripotent stem cell (iPSC). In some embodiments, the cell is a hematopoietic stem cell (HSC). In some embodiments, the cell is a human HSC. In some embodiments, the cell is a human CD34⁺ HSC. In some embodiments, the codon optimization is for expression in a human CD34⁺ hematopoietic stem progenitor cell (HSPC).

[0459] In some embodiments, the double stranded target DNA, e.g., a target gene edited by prime editing is in a chromosome of the cell. In some embodiments, the intended nucleotide edits incorporate in the chromosome of the cell and are inheritable by progeny cells. In some embodiments, the intended nucleotide edits introduced to the cell by the prime editing compositions and methods are such that the cell and progeny of the cell also include the intended nucleotide edits. In some embodiments, the cell is autologous, allogeneic, or xenogeneic to a subject. In some embodiments, the cell is from or derived from a subject. In some embodiments, the cell is from or derived from a human subject. In some embodiments, the cell is introduced back into the subject, e.g., a human subject, after incorporation of the intended nucleotide edits by prime editing.

[0460] In some embodiments, the method provided herein comprises introducing the prime editor polypeptide or the polynucleotide encoding the prime editor polypeptide, the PEgRNA or the polynucleotide encoding the PEgRNA, and/or the ngRNA or the polynucleotide encoding the ngRNA into a plurality or a population of cells that comprise the double stranded target DNA, e.g., a target gene. In some embodiments, the population of cells is of the same cell type. In some embodiments, the population of cells is of the same tissue or organ. In some embodiments, the population of cells is heterogeneous. In some embodiments, the population of cells is homogeneous. In some embodiments, the population of cells is from a single tissue or organ, and the cells are heterogeneous. In some embodiments, the introduction into the population of cells is ex vivo. In some embodiments, the introduction into the population of cells is in vivo, e.g., into a human subject.

[0461] In some embodiments, the double stranded target DNA, e.g., a target gene is in a genome of each cell of the population. In some embodiments, introduction of the prime editor polypeptide or the polynucleotide encoding the prime editor polypeptide, the PEgRNA or the polynucleotide encoding the PEgRNA, and/or the ngRNA or the polynucleotide encoding the ngRNA results in incorporation of one or more intended nucleotide edits in the double stranded target DNA, e.g., a target gene in at least one of the cells in the population of cells. In some embodiments, introduction of the prime editor polypeptide or the polynucleotide encoding the prime editor polypeptide, the PEgRNA or the polynucleotide encoding the PEgRNA, and/or the ngRNA or the polynucleotide encoding the ngRNA results in incorporation of the one or more intended nucleotide edits in the double stranded target DNA, e.g., a target gene in a plurality of the population of cells. In some embodiments, introduction of the prime editor polypeptide or the polynucleotide encoding the prime editor polypeptide, the PEgRNA or the polynucleotide encoding the PEgRNA, and/or the ngRNA or the polynucleotide encoding the ngRNA results in incorporation of the one or more intended nucleotide edits in the double stranded target DNA, e.g., a target gene in each cell of the population of cells. In some embodiments, introduction of the prime editor polypeptide or the polynucleotide encoding the prime editor polypeptide, the PEgRNA or the polynucleotide encoding the PEgRNA, and/or the ngRNA or the polynucleotide encoding the ngRNA results in incorporation of the one or more intended nucleotide edits in the double stranded target DNA, e.g., a target gene in sufficient number of cells such that the disease or disorder is treated, prevented or ameliorated.

[0462] In some embodiments, editing efficiency of the prime editing compositions and method described herein can be measured by calculating the percentage of edited double stranded target DNA, e.g., a target gene in a population of cells introduced with the prime editing composition. In some embodiments, the editing efficiency is determined after 1 hour, 2 hours, 6 hours, 12 hours, 24 hours, 36 hours, 48 hours, 3 days, 4 days, 5 days, 7 days, 10 days, or 14 days of exposing a double stranded target DNA, e.g., a target gene to a prime editing composition. In some embodiments, the population of cells introduced with the prime editing composition is ex vivo. In some embodiments, the population of cells introduced with the prime editing composition is in vitro. In some embodiments, the population of cells introduced with the prime editing composition is in vivo. In some embodiments, the prime editing methods disclosed herein have an editing efficiency of at least about 1%, at least about 5%, at least about 10%, at least about 20%, at least about 30%, at least about 40%, at least about 50%, at least about 60%, at least about 70%, at least about 80%, at least about 90%, at least about 95%, or at least about 99% relative to a suitable control. In some embodiments, the prime editing methods disclosed herein have an editing efficiency of at least 25% relative to a suitable control. In some embodiments, the prime editing methods disclosed herein have an editing efficiency of at least 35% relative to a suitable control. In some embodiments, the prime editing method disclosed herein has an editing efficiency of at least 30% relative to a suitable control. In some embodiments, the prime editing methods disclosed herein have an editing efficiency of at least 45% relative to a suitable control. In some embodiments, the prime editing methods disclosed herein have an editing efficiency of at least 50% relative to a suitable control.

[0463] In some embodiments, the methods disclosed herein have an editing efficiency of at least about 1%, at least about 5%, at least about 7.5%, at least about 10%, at least about 15%, at least about 20%, at least about 30%, at least about 40%, at least about 50%, at least about 60%, at least about 70%, at least about 80%, at least about 90%, or at least about 95% of editing in a primary cell relative to a suitable control primary cell.

[0464] In some embodiments, the methods disclosed herein have an editing efficiency of at least about 5%, at least about 7.5%, at least about 10%, at least about 15%, at least about 20%, at least about 30%, at least about 40%, at least about 50%, at least about 60%, at least about 70%, at least about 80%, at least about 90%, or at least about 95% of editing in a hepatocyte relative to a corresponding control hepatocyte. In some embodiments, the hepatocyte is a human hepatocyte.

[0465] In some embodiments, the methods disclosed herein have an editing efficiency of at least about 5%, at least about 7.5%, at least about 10%, at least about 15%, at least about 20%, at least about 30%, at least about 40%, at least about 50%, at least about 60%, at least about 70%, at least about 80%, at least about 90%, or at least about 95% of editing in a hematopoietic stem cell (HSC) relative to a corresponding control HSC. In some embodiments, the HSC is a human HSC.

[0466] In some embodiments, the methods disclosed herein having an increased editing efficiency by at least 5%, at least 10%, at least 15%, at least 20%, at least 25%, at least 30%, at least 35%, at least 40%, at least 45%, at least 50%, at least 55%, at least 60%, at least 65%, at least 70%, at least 75%, at least 80%, at least 85%, at least 90%, at least 95%, at least 100%, at least 110%, at least 120%, at least 130%, at least 140%, at least 150%, at least 160%, at least 170%, at least 180%, at least 190%, at least 200%, at least 210%, at least 220%, at least 230%, at least 240%, at least 250%, at least 260%, at least 270%, at least 280%, at least 290%, at least 300% or more compared to prime editing with a prime editor having the sequence of SEQ ID NO: 25 and/or encoded by SEQ ID NO: 26. In some embodiments, the methods disclosed herein having an increased editing efficiency by at least 5%, at least 10%, at least 15%, at least 20%, at least 25%, at least 30%, at least 35%, at least 40%, at least 45%, at least 50%, at least 55%, at least 60%, at least 65%, at least 70%, at least 75%, at least 80%, at least 85%, at least 90%, at least 95%, at least 100%, at least 110%, at least 120%, at least 130%, at least 140%, at least 150%, at least 160%, at least 170%, at least 180%, at least 190%, at least 200%, at least 210%, at least 220%, at least 230%, at least 240%, at least 250%, at least 260%, at least 270%, at least 280%, at least 290%, at least 300% or more compared to prime editing with a prime editor having the sequence of SEQ ID NO: 25 and/or encoded by SEQ ID NO: 26. In some embodiments, the increased editing efficiency is in a human cell. In some embodiments, the increased editing efficiency is in a primary cell. In some embodiments, the increased editing efficiency is in a human primary cell. In some embodiments, the increased editing efficiency is in a progenitor cell. In some embodiments, the increased editing efficiency is in a human progenitor cell. In some embodiments, the increased editing efficiency is in a hepatocyte. In some embodiments, the increased editing efficiency is in a human hepatocyte. In some embodiments, the increased editing efficiency is in a primary human hepatocyte derived from an induced human pluripotent stem cell (iPSC). In some embodiments, the increased editing efficiency is in a hematopoietic stem cell (HSC). In some embodiments, the increased editing efficiency is in a primary cell. In some embodiments, the increased editing efficiency is in a human CD34+ HSC.

[0467] In some embodiments, the prime editing compositions provided herein are capable of incorporating one or more intended nucleotide edits without generating a significant proportion of indels. The term “indel(s)”, as used herein, refers to the insertion or deletion of a nucleotide base within a polynucleotide, for example, a double stranded target DNA, e.g., a target gene. Such insertions or deletions can lead to frame shift mutations within a coding region of a gene. Indel frequency of editing can be calculated by methods known in the art. In some embodiments, indel frequency can be calculated based on sequence alignment such as the CRISPResso 2 algorithm as described in Clement et al., Nat. Biotechnol. 37(3): 224-226 (2019), which is incorporated herein in its entirety. In some embodiments, the methods disclosed herein can have an indel frequency of less than 20%, less than 10%, less than 9%, less than 8%, less than 7%, less than 6%, less than 5%, less than 4%, less than 3%, less than 2%, less than 1.5%, or less than 1%. In some embodiments, any number of indels is determined after at least 1 hour, at least 2 hours, at least 6 hours, at least 12 hours, at least 24 hours, at least 36 hours, at least 48 hours, at least 3 days, at least 4 days, at least 5 days, at least 7 days, at least 10 days, or at least 14 days of exposing a double stranded target DNA, e.g., a target gene.

[0468] In some embodiments, the prime editing compositions provided herein are capable of incorporating one or more intended nucleotide edits efficiently without generating a significant proportion of indels. In some embodiments, the prime editing methods disclosed herein have an editing efficiency of at least about 1% and an indel frequency of less than 1% in a target cell, e.g., a human HSC. In some embodiments, the prime editing methods disclosed herein have an editing efficiency of at least about 1% and an indel frequency of less than 0.5% in a target cell, a human HSC. In some embodiments, the prime editing methods disclosed herein have an editing efficiency of at least about 1% and an indel frequency of less than 0.1% in a target cell, e.g., a human HSC. In some embodiments, the prime editing methods disclosed herein have an editing efficiency of at least about 5% and an indel frequency of less than 1% in a target cell, e.g. a human HSC. In some embodiments, the prime editing methods disclosed herein have an editing efficiency of at least about 5% and an indel frequency of less than 0.5% in a target cell, e.g., a human HSC. In some embodiments, the prime editing methods disclosed herein have an editing efficiency of at least about 5% and an indel frequency of less than 0.1% in a target cell, e.g., a human HSC.

[0469] In some embodiments, the prime editing methods disclosed herein have an editing efficiency of at least about 7.5% and an indel frequency of less than 1% in a target cell, e.g., a human HSC. In some embodiments, the prime editing methods disclosed herein have an editing efficiency of at least about 7.5% and an indel frequency of less than 0.5% in a target cell, e.g., a human HSC. In some embodiments, the prime editing methods disclosed herein have an editing efficiency of at least about 7.5% and an indel frequency of less than 0.1% in a target cell, e.g., a human HSC.

[0470] In some embodiments, the prime editing methods disclosed herein have an editing efficiency of at least about 10% and an indel frequency of less than 1% in a target cell, e.g., a human HSC. In some embodiments, the prime editing methods disclosed herein have an editing efficiency of at least about 10% and an indel frequency of less than 0.5% in a target cell, e.g., a human HSC. In some embodiments, the prime editing methods disclosed herein have an editing efficiency of at least about 10% and an indel frequency of less than 0.1% in a target cell, e.g., a human HSC.

[0471] In some embodiments, the prime editing methods disclosed herein have an editing efficiency of at least about 15% and an indel frequency of less than 1% in a target cell, e.g., a human HSC. In some embodiments, the prime editing methods disclosed herein have an editing efficiency of at least about 15% and an indel frequency of less than 0.5% in a target cell, e.g., a human HSC. In some embodiments, the prime editing methods disclosed herein have an editing efficiency of at least about 15% and an indel frequency of less than 0.1% in a target cell, e.g., a human HSC.

[0472] In some embodiments, the prime editing methods disclosed herein have an editing efficiency of at least about 20% and an indel frequency of less than 1% in a target cell, e.g., a human HSC. In some embodiments, the prime editing methods disclosed herein have an editing efficiency of at least about 20% and an indel frequency of less than 0.5% in a target cell, e.g., a human HSC. In some embodiments, the prime editing methods disclosed herein have an editing efficiency of at least about 20% and an indel frequency of less than 0.1% in a target cell, e.g., a human HSC.

[0473] In some embodiments, the prime editing methods disclosed herein have an editing efficiency of at least about 30% and an indel frequency of less than 1% in a target cell, e.g., a human HSC. In some embodiments, the prime editing methods disclosed herein have an editing efficiency of at least about 30% and an indel frequency of less than 0.5% in a target cell, e.g., a human HSC. In some embodiments, the prime editing methods disclosed herein have an editing efficiency of at least about 30% and an indel frequency of less than 0.1% in a target cell, e.g., a human HSC.

[0474] In some embodiments, the prime editing methods disclosed herein have an editing efficiency of at least about 40% and an indel frequency of less than 1% in a target cell, e.g., a human HSC. In some embodiments, the prime editing methods disclosed herein have an editing efficiency of at least about 40% and an indel frequency of less than 0.5% in a target cell, e.g., a human HSC. In some embodiments, the prime editing methods disclosed herein have an editing efficiency of at least about 40% and an indel frequency of less than 0.1% in a target cell, e.g., a human HSC.

[0475] In some embodiments, the prime editing methods disclosed herein have an editing efficiency of at least about 50% and an indel frequency of less than 1% in a target cell, e.g., a human HSC. In some embodiments, the prime editing methods disclosed herein have an editing efficiency of at least about 50% and an indel frequency of less than 0.5% in a target cell, e.g., a human HSC. In some embodiments, the prime editing methods disclosed herein have an editing efficiency of at least about 50% and an indel frequency of less than 0.1% in a target cell, e.g., a human HSC.

[0476] In some embodiments, the prime editing methods disclosed herein have an editing efficiency of at least about 60% and an indel frequency of less than 1% in a target cell, e.g., a human HSC. In some embodiments, the prime editing methods disclosed herein have an editing efficiency of at least about 60% and an indel frequency of less than 0.5% in a target cell, e.g., a human HSC. In some embodiments, the prime editing methods disclosed herein have an editing efficiency of at least about 60% and an indel frequency of less than 0.1% in a target cell, e.g., a human HSC.

[0477] In some embodiments, the prime editing methods disclosed herein have an editing efficiency of at least about 70% and an indel frequency of less than 1% in a target cell, e.g., a human HSC. In some embodiments, the prime editing methods disclosed herein have an editing efficiency of at least about 70% and an indel frequency of less than 0.5% in a target cell, e.g., a human HSC. In some embodiments, the prime editing methods disclosed herein have an editing efficiency of at least about 70% and an indel frequency of less than 0.1% in a target cell, e.g., a human HSC.

[0478] In some embodiments, the prime editing methods disclosed herein have an editing efficiency of at least about 80% and an indel frequency of less than 1% in a target cell, e.g., a human HSC. In some embodiments, the prime editing methods disclosed herein have an editing efficiency of at least about 80% and an indel frequency of less than 0.5% in a target cell, e.g., a human HSC. In some embodiments, the prime editing methods disclosed herein have an editing efficiency of at least about 80% and an indel frequency of less than 0.1% in a target cell, e.g., a human HSC.

[0479] In some embodiments, the prime editing methods disclosed herein have an editing efficiency of at least about 90% and an indel frequency of less than 1% in a target cell, e.g., a human HSC. In some embodiments, the prime editing methods disclosed herein have an editing efficiency of at least about 90% and an indel frequency of less than 0.5% in a target cell, e.g., a human HSC. In some embodiments, the prime editing methods disclosed herein have an editing efficiency of at least about 90% and an indel frequency of less than 0.1% in a target cell, e.g., a human HSC.

[0480] In some embodiments, the prime editing methods disclosed herein have an editing efficiency of at least about 95% and an indel frequency of less than 1% in a target cell, e.g., a human cell. In some embodiments, the prime editing methods disclosed herein have an editing efficiency of at least about 95% and an indel frequency of less than 0.5% in a target cell, e.g., a human cell. In some embodiments, the prime editing methods disclosed herein have an editing efficiency of at least about 95% and an indel frequency of less than 0.1% in a target cell, e.g., a human cell.

[0481] In some embodiments, the prime editing methods disclosed herein have an editing efficiency of at least about 1% and an indel frequency of less than 10% in a population of target cells, e.g., a population of human cells, such as a human stem cell. In some embodiments, the prime editing methods disclosed herein have an editing efficiency of at least about 1% and an indel frequency of less than 7.5% in a population of target cells. In some embodiments, the prime editing methods disclosed herein have an editing efficiency of at least about 1% and an indel frequency of less than 5% in a population of target cells. In some embodiments, the prime editing methods disclosed herein have an editing efficiency of at least about 1% and an indel frequency of less than 2.5% in a population of target cells. In some embodiments, the prime editing methods disclosed herein have an editing efficiency of at least about 1% and an indel frequency of less than 1% in a population of target cells. In some embodiments, the prime editing methods disclosed herein have an editing efficiency of at least about 1% and an indel frequency of less than 0.5% in a population of target cells. In some embodiments, the prime editing methods disclosed herein have an editing efficiency of at least about 1% and an indel frequency of less than 0.1% in a population of target cells.

[0482] In some embodiments, the prime editing methods disclosed herein have an editing efficiency of at least about 5% and an indel frequency of less than 10% in a population of target cells. In some embodiments, the prime editing methods disclosed herein have an editing efficiency of at least about 5% and an indel frequency of less than 7.5% in a population of target cells. In some embodiments, the prime editing methods disclosed herein have an editing efficiency of at least about 5% and an indel frequency of less than 5% in a population of target cells. In some embodiments, the prime editing methods disclosed herein have an editing efficiency of at least about 5% and an indel frequency of less than 2.5% in a population of target cells. In some embodiments, the prime editing methods disclosed herein have an editing efficiency of at least about 5% and an indel frequency of less than 1% in a population of target cells. In some embodiments, the prime editing methods disclosed herein have an editing efficiency of at least about 5% and an indel frequency of less than 0.5% in a population of target cells. In some embodiments, the prime editing methods disclosed herein have an editing efficiency of at least about 5% and an indel frequency of less than 0.1% in a population of target cells.

[0483] In some embodiments, the prime editing methods disclosed herein have an editing efficiency of at least about 7.5% and an indel frequency of less than 10% in a population of target cells. In some embodiments, the prime editing methods disclosed herein have an editing efficiency of at least about 7.5% and an indel frequency of less than 7.5% in a population of target cells. In some embodiments, the prime editing methods disclosed herein have an editing efficiency of at least about 7.5% and an indel frequency of less than 5% in a population of target cells. In some embodiments, the prime editing methods disclosed herein have an editing efficiency of at least about 7.5% and an indel frequency of less than 2.5% in a population of target cells. In some embodiments, the prime editing methods disclosed herein have an editing efficiency of at least about 7.5% and an indel frequency of less than 1% in a population of target cells. In some embodiments, the prime editing methods disclosed herein have an editing efficiency of at least about 7.5% and an indel frequency of less than 0.5% in a population of target cells. In some embodiments, the prime editing methods disclosed herein have an editing efficiency of at least about 7.5% and an indel frequency of less than 0.1% in a population of target cells.

[0484] In some embodiments, the prime editing methods disclosed herein have an editing efficiency of at least about 10% and an indel frequency of less than 10% in a population of target cell. In some embodiments, the prime editing methods disclosed herein have an editing efficiency of at least about 10% and an indel frequency of less than 7.5% in a population of target cells. In some embodiments, the prime editing methods disclosed herein have an editing efficiency of at least about 10% and an indel frequency of less than 5% in a population of target cells. In some embodiments, the prime editing methods disclosed herein have an editing efficiency of at least about 10% and an indel frequency of less than 2.5% in a population of target cells. In some embodiments, the prime editing methods disclosed herein have an editing efficiency of at least about 10% and an indel frequency of less than 1% in a population of target cells. In some embodiments, the prime editing methods disclosed herein have an editing efficiency of at least about 10% and an indel frequency of less than 0.5% in a population of target cells. In some embodiments, the prime editing methods disclosed herein have an editing efficiency of at least about 10% and an indel frequency of less than 0.1% in a population of target cells.

[0485] In some embodiments, the prime editing methods disclosed herein have an editing efficiency of at least about 15% and an indel frequency of less than 10% in a population of target cells. In some embodiments, the prime editing methods disclosed herein have an editing efficiency of at least about 15% and an indel frequency of less than 7.5% in a population of target cells. In some embodiments, the prime editing methods disclosed herein have an editing efficiency of at least about 15% and an indel frequency of less than 5% in a population of target cells. In some embodiments, the prime editing methods disclosed herein have an editing efficiency of at least about 15% and an indel frequency of less than 2.5% in a population of target cells. In some embodiments, the prime editing methods disclosed herein have an editing efficiency of at least about 15% and an indel frequency of less than 1% in a population of target cells. In some embodiments, the prime editing methods disclosed herein have an editing efficiency of at least about 15% and an indel frequency of less than 0.5% in a population of target cells. In some embodiments, the prime editing methods disclosed herein have an editing efficiency of at least about 15% and an indel frequency of less than 0.1% in a population of target cells.

[0486] In some embodiments, the prime editing methods disclosed herein have an editing efficiency of at least about 20% and an indel frequency of less than 10% in a population of target cells. In some embodiments, the prime editing methods disclosed herein have an editing efficiency of at least about 20% and an indel frequency of less than 7.5% in a population of target cells. In some embodiments, the prime editing methods disclosed herein have an editing efficiency of at least about 20% and an indel frequency of less than 5% in a population of target cells. In some embodiments, the prime editing methods disclosed herein have an editing efficiency of at least about 20% and an indel frequency of less than 2.5% in a population of target cells. In some embodiments, the prime editing methods disclosed herein have an editing efficiency of at least about 20% and an indel frequency of less than 1% in a population of target cells, e.g., a population of human stem cell. In some embodiments, the prime editing methods disclosed herein have an editing efficiency of at least about 20% and an indel frequency of less than 0.5% in a population of target cells. In some embodiments, the prime editing methods disclosed herein have an editing efficiency of at least about 20% and an indel frequency of less than 0.1% in a population of target cells.

[0487] In some embodiments, the prime editing methods disclosed herein have an editing efficiency of at least about 30% and an indel frequency of less than 10% in a population of target cells. In some embodiments, the prime editing methods disclosed herein have an editing efficiency of at least about 30% and an indel frequency of less than 7.5% in a population of target cells. In some embodiments, the prime editing methods disclosed herein have an editing efficiency of at least about 30% and an indel frequency of less than 5% in a population of target cells. In some embodiments, the prime editing methods disclosed herein have an editing efficiency of at least about 30% and an indel frequency of less than 2.5% in a population of target cells. In some embodiments, the prime editing methods disclosed herein have an editing efficiency of at least about 30% and an indel frequency of less than 1% in a population of target cells. In some embodiments, the prime editing methods disclosed herein have an editing efficiency of at least about 30% and an indel frequency of less than 0.5% in a population of target cells. In some embodiments, the prime editing methods disclosed herein have an editing efficiency of at least about 30% and an indel frequency of less than 0.1% in a population of target cells.

[0488] In some embodiments, the prime editing methods disclosed herein have an editing efficiency of at least about 40% and an indel frequency of less than 10% in a population of target cells. In some embodiments, the prime editing methods disclosed herein have an editing efficiency of at least about 40% and an indel frequency of less than 7.5% in a population of target cells. In some embodiments, the prime editing methods disclosed herein have an editing efficiency of at least about 40% and an indel frequency of less than 5% in a population of target cells. In some embodiments, the prime editing methods disclosed herein have an editing efficiency of at least about 40% and an indel frequency of less than 2.5% in a population of target cells. In some embodiments, the prime editing methods disclosed herein have an editing efficiency of at least about 40% and an indel frequency of less than 1% in a population of target cells. In some embodiments, the prime editing methods disclosed herein have an editing efficiency of at least about 40% and an indel frequency of less than 0.5% in a population of target cells. In some embodiments, the prime editing methods disclosed herein have an editing efficiency of at least about 40% and an indel frequency of less than 0.1% in a population of target cells.

[0489] In some embodiments, the prime editing methods disclosed herein have an editing efficiency of at least about 50% and an indel frequency of less than 10% in a population of target cells. In some embodiments, the prime editing methods disclosed herein have an editing efficiency of at least about 50% and an indel frequency of less than 7.5% in a population of target cells. In some embodiments, the prime editing methods disclosed herein have an editing efficiency of at least about 50% and an indel frequency of less than 5% in a population of target cells. In some embodiments, the prime editing methods disclosed herein have an editing efficiency of at least about 50% and an indel frequency of less than 2.5% in a population of target cells. In some embodiments, the prime editing methods disclosed herein have an editing efficiency of at least about 50% and an indel frequency of less than 1% in a population of target cells. In some embodiments, the prime editing methods disclosed herein have an editing efficiency of at least about 50% and an indel frequency of less than 0.5% in a population of target cells. In some embodiments, the prime editing methods disclosed herein have an editing efficiency of at least about 50% and an indel frequency of less than 0.1% in a population of target cells.

[0490] In some embodiments, the prime editing methods disclosed herein have an editing efficiency of at least about 60% and an indel frequency of less than 10% in a population of target cells. In some embodiments, the prime editing methods disclosed herein have an editing efficiency of at least about 60% and an indel frequency of less than 7.5% in a population of target cells. In some embodiments, the prime editing methods disclosed herein have an editing efficiency of at least about 60% and an indel frequency of less than 5% in a population of target cells. In some embodiments, the prime editing methods disclosed herein have an editing efficiency of at least about 60% and an indel frequency of less than 2.5% in a population of target cells. In some embodiments, the prime editing methods disclosed herein have an editing efficiency of at least about 60% and an indel frequency of less than 1% in a population of target cells. In some embodiments, the prime editing methods disclosed herein have an editing efficiency of at least about 60% and an indel frequency of less than 0.5% in a population of target cells. In some embodiments, the prime editing methods disclosed herein have an editing efficiency of at least about 60% and an indel frequency of less than 0.1% in a population of target cells.

[0491] In some embodiments, the prime editing methods disclosed herein have an editing efficiency of at least about 70% and an indel frequency of less than 10% in a population of target cells. In some embodiments, the prime editing methods disclosed herein have an editing efficiency of at least about 70% and an indel frequency of less than 7.5% in a population of target cells. In some embodiments, the prime editing methods disclosed herein have an editing efficiency of at least about 70% and an indel frequency of less than 5% in a population of target cells. In some embodiments, the prime editing methods disclosed herein have an editing efficiency of at least about 70% and an indel frequency of less than 2.5% in a population of target cells. In some embodiments, the prime editing methods disclosed herein have an editing efficiency of at least about 70% and an indel frequency of less than 1% in a population of target cells. In some embodiments, the prime editing methods disclosed herein have an editing efficiency of at least about 70% and an indel frequency of less than 0.5% in a population of target cells. In some embodiments, the prime editing methods disclosed herein have an editing efficiency of at least about 70% and an indel frequency of less than 0.1% in a population of target cells.

[0492] In some embodiments, the prime editing methods disclosed herein have an editing efficiency of at least about 80% and an indel frequency of less than 10% in a population of target cells. In some embodiments, the prime editing methods disclosed herein have an editing efficiency of at least about 80% and an indel frequency of less than 7.5% in a population of target cells. In some embodiments, the prime editing methods disclosed herein have an editing efficiency of at least about 80% and an indel frequency of less than 5% in a population of target cells. In some embodiments, the prime editing methods disclosed herein have an editing efficiency of at least about 80% and an indel frequency of less than 2.5% in a population of target cells. In some embodiments, the prime editing methods disclosed herein have an editing efficiency of at least about 80% and an indel frequency of less than 1% in a population of target cells. In some embodiments, the prime editing methods disclosed herein have an editing efficiency of at least about 80% and an indel frequency of less than 0.5% in a population of target cells. In some embodiments, the prime editing methods disclosed herein have an editing efficiency of at least about 80% and an indel frequency of less than 0.1% in a population of target cells.

[0493] In some embodiments, the prime editing methods disclosed herein have an editing efficiency of at least about 90% and an indel frequency of less than 10% in a population of target cells. In some embodiments, the prime editing methods disclosed herein have an editing efficiency of at least about 90% and an indel frequency of less than 7.5% in a population of target cells. In some embodiments, the prime editing methods disclosed herein have an editing efficiency of at least about 90% and an indel frequency of less than 5% in a population of target cells. In some embodiments, the prime editing methods disclosed herein have an editing efficiency of at least about 90% and an indel frequency of less than 2.5% in a population of target cells. In some embodiments, the prime editing methods disclosed herein have an editing efficiency of at least about 90% and an indel frequency of less than 1% in a population of target cells. In some embodiments, the prime editing methods disclosed herein have an editing efficiency of at least about 90% and an indel frequency of less than 0.5% in a population of target cells. In some embodiments, the prime editing methods disclosed herein have an editing efficiency of at least about 90% and an indel frequency of less than 0.1% in a population of target cells.

[0494] In some embodiments, the prime editing methods disclosed herein have an editing efficiency of at least about 95% and an indel frequency of less than 10% in a population of target cells. In some embodiments, the prime editing methods disclosed herein have an editing efficiency of at least about 95% and an indel frequency of less than 7.5% in a population of target cells. In some embodiments, the prime editing methods disclosed herein have an editing efficiency of at least about 95% and an indel frequency of less than 5% in a population of target cells. In some embodiments, the prime editing methods disclosed herein have an editing efficiency of at least about 95% and an indel frequency of less than 2.5% in a population of target cells. In some embodiments, the prime editing methods disclosed herein have an editing efficiency of at least about 95% and an indel frequency of less than 1% in a population of target cells. In some embodiments, the prime editing methods disclosed herein have an editing efficiency of at least about 95% and an indel frequency of less than 0.5% in a population of target cells. In some embodiments, the prime editing methods disclosed herein have an editing efficiency of at least about 95% and an indel frequency of less than 0.1% in a population of target cells.

[0495] In some embodiments, the target gene is in a target cell. Accordingly, in one aspect provided herein is a method of editing a target cell comprising a double stranded target DNA (e.g., a target gene) that encoded a polypeptide, wherein the double stranded target DNA comprises one or more mutations relative to the wild-type double stranded DNA (e.g., wild-type gene). In some embodiments, the methods of the present disclosure comprise introducing a prime editing composition comprising a PEgRNA, a prime editor polypeptide, a ngRNA, and/or a polynucleotide encoding the PEgRNA, the prime editor polypeptide, or the ngRNA into the target cell that has the target gene to edit the target gene, thereby generating an edited cell. In some embodiments, a target cell is a cell disclosed herein. In some embodiments, the target cell is a mammalian cell. In some embodiments, the target cell is a human cell.

[0496] In some embodiments, components of a prime editing composition described herein are provided to a target cell in vitro. In some embodiments, components of a prime editing composition described herein are provided to a target cell ex vivo. In some embodiments, components of a prime editing composition described herein are provided to a target cell in vivo.

[0497] In some embodiments, any number of indels is determined after at least 1 hour, at least 2 hours, at least 6 hours, at least 12 hours, at least 24 hours, at least 36 hours, at least 48 hours, at least 3 days, at least 4 days, at least 5 days, at least 7 days, at least 10 days, or at least 14 days of exposing a double stranded target DNA, e.g., a target gene to a prime editing composition. In some embodiments, the editing efficiency is determined after 1 hour, 2 hours, 6 hours, 12 hours, 24 hours, 36 hours, 48 hours, 3 days, 4 days, 5 days, 7 days, 10 days, or 14 days of exposing a double stranded target DNA, e.g., a target gene, to a prime editing composition.

[0498] In some embodiments, the prime editing composition described herein result in less than 50%, less than 40%, less than 30%, less than 20%, less than 19%, less than 18%, less than 17%, less than 16%, less than 15%, less than 14%, less than 13%, less than 12%, less than 11%, less than 10%, less than 9%, less than 8%, less than 7%, less than 6%, less than 5%, less than 4%, less than 3%, less than 2%, less than 1%, less than 0.9%, less than 0.8%, less than 0.7%, less than 0.6%, less than 0.5%, less than 0.4%, less than 0.3%, less than 0.2%, less than 0.1%, less than 0.09%, less than 0.08%, less than 0.07%, less than 0.06%, less than 0.05%, less than 0.04%, less than 0.03%, less than 0.02%, or less than 0.01% off-target editing in a chromosome that includes the double stranded target DNA, e.g., a target gene. In some embodiments, off-target editing is determined after at least 1 hour, at least 2 hours, at least 6 hours, at least 12 hours, at least 24 hours, at least 36 hours, at least 48 hours, at least 3 days, at least 4 days, at least 5 days, at least 7 days, at least 10 days, or at least 14 days of exposing a double stranded target DNA, e.g., a target gene (e.g., a nucleic acid within the genome of a cell) to a prime editing composition.

[0499] In some embodiments, components of a prime editing composition described herein are provided to a target cell in vitro. In some embodiments, components of a prime editing composition described herein are provided to a target cell ex vivo. In some embodiments, components of a prime editing composition described herein are provided to a target cell in vivo.

[0500] In some embodiments, the prime editing compositions (e.g., PEgRNAs and prime editors as described herein) and prime editing methods disclosed herein can be used to edit a double stranded target DNA, e.g., a target gene. In some embodiments, the double stranded target DNA, e.g., a target gene, comprises a mutation compared to a wild-type sequence of the same gene. In some embodiments, the mutation is associated with a genetic disease or disorder. In some embodiments, the mutation is in a coding region of the double stranded target DNA, e.g., a target gene. In some embodiments, the mutation is in an exon of the double stranded target DNA, e.g., a target gene. In some embodiments, the prime editing method comprises contacting a double stranded target DNA, e.g., a target gene, with a prime editing composition comprising a prime editor, a PEgRNA, and/or a ngRNA. In some embodiments, contacting the double stranded target DNA, e.g., a target gene, with the prime editing composition results in incorporation of one or more intended nucleotide edits in the double stranded target DNA, e.g., a target gene. In some embodiments, the incorporation is in a region of the double stranded target DNA, e.g., a target gene, that corresponds to an editing target sequence in the target gene. In some embodiments, the one or more intended nucleotide edits comprises a single nucleotide substitution, an insertion, a deletion, or any combination thereof, compared to the endogenous sequence of the double stranded target DNA, e.g., a target gene. In some embodiments, incorporation of the one or more intended nucleotide edits results in replacement of one or more mutations with a DNA sequence that encodes a corresponding wild-type protein. In some embodiments, incorporation of the one or more intended nucleotide edits results in replacement of the one or more mutations with the corresponding wild-type gene sequence. In some embodiments, incorporation of the one more intended nucleotide edits results in correction of a mutation in the double stranded target DNA, e.g., a target gene. In some embodiments, the double stranded target DNA, e.g., a target gene, comprises an editing template sequence that contains the mutation. In some embodiments, contacting the double stranded target DNA, e.g., a target gene, with the prime editing composition results in incorporation of one or more intended nucleotide edits in the double stranded target DNA, e.g., a target gene, which corrects the mutation in the editing target sequence (or a double stranded region comprising the editing target sequence and the complementary sequence to the editing target sequence on a target strand) in the double stranded target DNA, e.g., a target gene. In some embodiments, incorporation of the one or more intended nucleotide edits in the double stranded target DNA, e.g., a target gene, that comprises one or more mutations, restores wild-type expression and function of a protein encoded by the target gene. In some embodiments, expression and/or function of the protein encoded by the target gene may be measured when expressed in a target cell. In some embodiments, incorporation of the one or more intended nucleotide edits in the double stranded target DNA, e.g., a target gene, leads to a fold change in a level of the target gene expression and/or a fold change in a level of the functional protein encoded by the target gene. In some embodiments, a change in the level of the target gene expression level can comprise a fold change of, e.g., 2-fold, 3-fold, 4-fold, 5-fold, 6-fold, 7-fold, 8-fold, 9-fold, 10-fold, 15-fold, 20-fold, 25-fold, 30-fold, 40-fold, 50-fold, 60-fold, 70-fold, 80-fold, 90-fold, 100-fold or greater as compared to expression in a suitable control cell not introduced with a prime editing composition described herein. In some embodiments, incorporation of the one or more intended nucleotide edits in the double stranded target DNA, e.g., a target gene, that comprises one or more mutations, restores wild-type expression of the functional protein encoded by the target gene by at least 10%, 20%, 30%, 40%, 50%, 60%, 70%, 80%, 90%, 95%, o99% or more as compared to wild-type expression of the corresponding protein in a suitable control cell that comprises a wild-type target gene.

[0501] In some embodiments, an expression increase can be measured by a functional assay. In some embodiments, protein expression can be measured using a protein assay. In some embodiments, protein expression can be measured using antibody testing. In some embodiments, protein expression can be measured using ELISA, mass spectrometry, Western blot, sodium dodecyl sulfate polyacrylamide gel electrophoresis (SDS-PAGE), high performance liquid chromatography (HPLC), electrophoresis, or any combination thereof. In some embodiments, a protein assay can comprise SDS-PAGE and densitometric analysis of a Coomassie Blue-stained gel.

[0502] In some embodiments, the target gene comprises one or more mutations associated with a genetic disease or disorder. Accordingly, in some embodiments, provided herein are methods for treatment of a subject diagnosed with a disease associated with or caused by one or more pathogenic mutations that can be corrected by prime editing.

[0503] In some embodiments, provided herein are methods for treating a genetic disease that comprise administering to a subject a therapeutically effective amount of a prime editing composition, or a pharmaceutical composition comprising a prime editing composition as described herein. In some embodiments, administration of the prime editing composition results in incorporation of one or more intended nucleotide edits in the double stranded target DNA, e.g., a target gene, in the subject. In some embodiments, administration of the prime editing composition results in correction of one or more pathogenic mutations, e.g., point mutations, insertions, or deletions, associated with a disease in the subject. In some embodiments, the double stranded target DNA, e.g., a target gene comprises an editing target sequence that contains the pathogenic mutation. In some embodiments, administration of the prime editing composition results in incorporation of one or more intended nucleotide edits in the double stranded target DNA, e.g., a target gene that corrects the pathogenic mutation in the editing target sequence (or a double stranded region comprising the editing target sequence and the complementary sequence to the editing target sequence on a target strand) of the double stranded target DNA, e.g., a target gene in the subject.

[0504] In some embodiments, the method provided herein comprises administering to a subject an effective amount of a prime editing composition, for example, a PEgRNA, a prime editor, and/or a ngRNA. In some embodiments, the method comprises administering to the subject an effective amount of a prime editing composition described herein, for example, polynucleotides, vectors, or constructs that encode prime editing composition components, or RNPs, LNPs, and/or polypeptides comprising prime editing composition components. Prime editing compositions can be administered to target the target gene having pathogenic mutation(s) in a subject, e.g., a human subject, suffering from, having, susceptible to, or at risk for the disease. Identifying a subject in need of such treatment can be in the judgment of a subject or a health care professional and can be subjective (e.g. opinion) or objective (e.g. measurable by a test or diagnostic method).

[0505] In some embodiments, the method comprises directly administering prime editing compositions provided herein to a subject. The prime editing compositions described herein can be delivered with in any form as described herein, e.g., as LNPs, RNPs, polynucleotide vectors such as viral vectors, or mRNAs. The prime editing compositions can be formulated with any pharmaceutically acceptable carrier described herein or known in the art for administering directly to a subject. Components of a prime editing composition or a pharmaceutical composition thereof may be administered to the subject simultaneously or sequentially. For example, in some embodiments, the method comprises administering a prime editing composition, or pharmaceutical composition thereof, comprising a complex that comprises a prime editor fusion protein and a PEgRNA and/or a ngRNA, to a subject. In some embodiments, the method comprises administering a polynucleotide or vector encoding a prime editor to a subject simultaneously with a PEgRNA and/or a ngRNA. In some embodiments, the method comprises administering a polynucleotide or vector encoding a prime editor to a subject before administration with a PEgRNA and/or a ngRNA.

[0506] Suitable routes of administrating the prime editing compositions to a subject include, without limitation: topical, subcutaneous, transdermal, intradermal, intralesional, intraarticular, intraperitoneal, intravesical, transmucosal, gingival, intradental, intracochlear, transtympanic, intraorgan, epidural, intrathecal, intramuscular, intravenous, intravascular, intraosseus, periocular, intratumoral, intracerebral, and intracerebroventricular administration. In some embodiments, the compositions described are administered intraperitoneally, intravenously, or by direct injection or direct infusion. In some embodiments, the compositions described are administered by direct injection or infusion or transfusion, transplantation (e.g., allogeneic hematopoietic stem cell transplantation (HSCT) using cells that have been contacted with a prime editing complex as described herein) to a subject. In some embodiments, the compositions described herein are administered to a subject by injection, by means of a catheter, by means of a suppository, or by means of an implant.

[0507] In some embodiments, the method comprises administering cells edited with a prime editing composition described herein to a subject. In some embodiments, the cells are allogeneic. In some embodiments, allogeneic cells are or have been contacted ex vivo with a prime editing composition or pharmaceutical composition thereof and are introduced into a human subject in need thereof. In some embodiments, the cells are autologous to the subject. In some embodiments, cells are removed from a subject and contacted ex vivo with a prime editing composition or pharmaceutical composition thereof and are re-introduced into the subject.

[0508] In some embodiments, cells are contacted ex vivo with one or more components of a prime editing composition. The cells may be contacted ex vivo with any approach described herein or known in the art. For example, in some embodiments, one or more target cells are contacted with one or more components of a prime editing composition ex vivo by electroporation. In some embodiments, one or more target cells are contacted with one or more components of a prime editing composition ex vivo by a LNP comprising the prime editing composition or components thereof. In some embodiments, one or more target cells are contacted with one or more components of a prime editing composition ex vivo, wherein one or more components of the prime editing composition is associated with a cell penetrating peptide. In some embodiments, the ex vivo-contacted cells are introduced into the subject, and the subject is administered in vivo with one or more components of a prime editing composition. For example, in some embodiments, cells are contacted ex vivo with a prime editor and introduced into a subject. In some embodiments, the subject is then administered with a PEgRNA and/or a ngRNA, or a polynucleotide encoding the PEgRNA and/or the ngRNA.

[0509] In some embodiments, cells contacted with the prime editing composition are determined for incorporation of the one or more intended nucleotide edits in the genome before re-introduction into the subject. In some embodiments, the cells are enriched for incorporation of the one or more intended nucleotide edits in the genome before re-introduction into the subject. In some embodiments, the edited cells are primary cells. In some embodiments, the edited cells are progenitor cells. In some embodiments, the edited cells are stem cells. In some embodiments, the edited cells are hepatocytes. In some embodiments, the edited cells are primary human cells. In some embodiments, the edited cells are human progenitor cells. In some embodiments, the edited cells are human stem cells. In some embodiments, the edited cells are human hepatocytes. In some embodiments, the cell is a neuron. In some embodiments, the cell is a neuron from basal ganglia. In some embodiments, the cell is a neuron from basal ganglia of a subject. In some embodiments, the cell is a neuron in the basal ganglia of a subject.

[0510] The prime editing composition or components thereof may be introduced into a cell by any delivery approaches as described herein, including LNP administration, RNP administration, electroporation, nucleofection, transfection, viral transduction, microinjection, cell membrane disruption and diffusion, or any other approach known in the art.

[0511] The cells edited with prime editing can be introduced into the subject by any route known in the art. In some embodiments, the edited cells are administered to a subject by direct infusion. In some embodiments, the edited cells are administered to a subject by intravenous infusion. In some embodiments, the edited cells are administered to a subject as implants.

[0512] In some embodiments, the target gene to be edited in a subject is a HBB gene. In some embodiments, the HBB gene comprises a mutation associated with sickle cell disease. In some embodiments, the HBB gene comprises a mutation that encodes a E6V amino acid substitution in the beta globin protein encoded by the HBB gene compared to a wild type beta globin protein. In some embodiments, provided herein is a prime editing composition comprising a prime editor and a PEgRNA, wherein the PEgRNA is capable of directing the prime editor to correct the mutation associated with sickle cell diseases in a HBB gene. In some embodiments, the PEgRNA comprises an editing template that comprises an intended nucleotide edit, and wherein incorporation of the intended nucleotide edit in the HBB gene corrects the mutation in the HBB gene associated with sickle cell disease. In some embodiments, the editing template comprises a wild type sequence of a wild type HBB gene. Accordingly, in some embodiments, provided herein are methods of correcting a mutation associated with sickle cell disease in a HBB gene. In some embodiments, the method comprises contacting the HBB gene with a PEgRNA and a prime editor, wherein the PEgRNA directs the prime editor to incorporate an intended nucleotide edit in the HBB gene, thereby correcting the mutation associated with sickle cell disease in the HBB gene. In some embodiments, the HBB gene is in a cell. Accordingly, in some embodiments, the method comprises introducing into the cell comprising the HBB gene with a PEgRNA and a prime editor, wherein the PEgRNA directs the prime editor to incorporate an intended nucleotide edit in the HBB gene, thereby correcting the mutation associated with sickle cell disease in the HBB gene. In some embodiments, the method comprises introducing into the cell comprising the HBB gene with a PEgRNA and a polynucleotide encoding the prime editor, wherein upon expression of the prime editor, the PEgRNA directs the prime editor to incorporate an intended nucleotide edit in the HBB gene, thereby correcting the mutation associated with sickle cell disease in the HBB gene. In some embodiments, the cell is a blood cell. In some embodiments, the HBB gene is a hematopoietic stem cell (HSC). In some embodiments, the cell is in vivo. In some embodiments, the cell is ex vivo. In some embodiments, the PEgRNA and the prime editor are introduced into the cell simultaneously. In some embodiments, the PEgRNA and the polynucleotide encoding the prime editor are introduced into the cell simultaneously. In some embodiments, the PEgRNA and the prime editor are introduced into the cell sequentially, for example, the PEgRNA may be introduced prior to or after introduction of the prime editor. In some embodiments, the PEgRNA and the polynucleotide encoding the prime editor are introduced into the cell sequentially, for example, the PEgRNA may be introduced prior to or after introduction of the polynucleotide encoding the prime editor.

[0513] Accordingly, in some embodiments, provided herein is a method of treating sickle cell disease, wherein the method comprises administering to a subject in need thereof a PEgRNA and a prime editor or a polynucleotide encoding the prime editor, wherein the PEgRNA directs the prime editor to incorporate the intended nucleotide edit in a HBB gene in the subject, thereby correcting a mutation in the HBB gene and treating sickle cell disease. In some embodiments, the method of treating sickle cell disease comprises introducing a PEgRNA and a prime editor or a polynucleotide encoding the prime editor to a cell or a population of cells to correct a mutation associated with sickle cell disease in a HBB, and subsequently administering the edited cell or the edited population of cells to a subject in need thereof. In some embodiments, the cell or the population of cells are obtained from the subject in need thereof prior to editing. In some embodiments, the cell or the population of cells are obtained from a donor prior to editing. In some embodiments, the cell or the population of cells are hematopoietic stem cells. In some embodiments, the PEgRNA and the prime editor are administered simultaneously. In some embodiments, the PEgRNA and the polynucleotide encoding the prime editor are administered simultaneously. In some embodiments, the PEgRNA and the prime editor are administered sequentially, for example, the PEgRNA may be administered prior to or after administration of the prime editor. In some embodiments, the PEgRNA and the polynucleotide encoding the prime editor are administered sequentially, for example, the PEgRNA may be administered prior to or after administration of the polynucleotide encoding the prime editor.

[0514] The pharmaceutical compositions, prime editing compositions, and cells, as described herein, can be administered in effective amounts. In some embodiments, the effective amount depends upon the mode of administration. In some embodiments, the effective amount depends upon the stage of the condition, the age and physical condition of the subject, the nature of concurrent therapy, if any, and like factors well-known to the medical practitioner.

[0515] The specific dose administered can be a uniform dose for each subject. Alternatively, a subject's dose can be tailored to the approximate body weight of the subject. Other factors in determining the appropriate dosage can include the disease or condition to be treated or prevented, the severity of the disease, the route of administration, and the age, sex and medical condition of the patient.

[0516] In embodiments wherein components of a prime editing composition are administered sequentially, the time between sequential administration can be at least 1 hour, at least 2 hours, at least 6 hours, at least 12 hours, at least 24 hours, at least 36 hours, at least 48 hours, at least 3 days, at least 4 days, at least 5 days, at least 7 days, at least 10 days, or at least 14 days.

### Delivery

[0517] Prime editing compositions described herein can be delivered to a cellular environment with any approach known in the art. Components of a prime editing composition can be delivered to a cell by the same mode or different modes. For example, in some embodiments, a prime editor or components thereof (e.g., a DNA binding domain or a DNA polymerase domain) can be delivered as a polypeptide or a polynucleotide (DNA or RNA) encoding the polypeptide or as a ribonucleoprotein (RNP) complex. In some embodiments, a PEgRNA can be delivered directly as an RNA or as a DNA encoding the PEgRNA or as an RNA complexed to the PE protein as an RNP complex. In some embodiments, components of a prime editing composition can be delivered as a combination of DNA and RNA. In some embodiments, components of a prime editor composition can be delivered as a combination of polynucleotide e.g., DNA, or RNA, and protein.

[0518] In some embodiments, a prime editing composition component is encoded by a polynucleotide, a vector, or a construct. In some embodiments, a prime editor polypeptide, a PEgRNA and/or a ngRNA is encoded by a polynucleotide. In some embodiments, the polynucleotide encodes a prime editor fusion protein comprising a DNA binding domain and a DNA polymerase domain. In some embodiments, the polynucleotide encodes a DNA polymerase domain of a prime editor. In some embodiments, the polynucleotide encodes a DNA binding domain of a prime editor. In some embodiments, the polynucleotide encodes a portion of a prime editor protein, for example, a N-terminal portion of a prime editor fusion protein connected to an intein-N. In some embodiments, the polynucleotide encodes a portion of a prime editor protein, for example, a C-terminal portion of a prime editor fusion protein connected to an intein-C. In some embodiments, the polynucleotide encodes a PEgRNA and/or a ngRNA. In some embodiments, the polypeptide encodes two or more components of a prime editing composition, for example, a prime editor fusion protein and a PEgRNA.

[0519] In some embodiments, the polynucleotide encoding one or more prime editing composition components is delivered to a target cell is integrated into the genome of the cell for long-term expression, for example, by a retroviral vector. In some embodiments, the polynucleotide delivered to a target cell is expressed transiently. For example, the polynucleotide may be delivered in the form of a mRNA, or a non-integrating vector (non-integrating virus, plasmids, minicircle DNAs) for episomal expression.

[0520] In some embodiments, a polynucleotide encoding one or more prime editing system components can be operably linked to a regulatory element, e.g., a transcriptional control element, such as a promoter. In some embodiments, the polynucleotide is operably linked to multiple control elements. Depending on the expression system utilized, any of a number of suitable transcription and translation control elements, including constitutive and inducible promoters, transcription enhancer elements, transcription terminators, etc. may be used in the expression vector (e.g., U6 promoter, H1 promoter).

[0521] In some embodiments, the polynucleotide encoding one or more prime editing composition components is a part of, or is encoded by, a vector (e.g., a plasmid vector or a viral vector). In some embodiments, the vector is a viral vector. In some embodiments, the vector is a non-viral vector. In some embodiments, delivery is in vivo, in vitro, ex vivo, or in situ.

[0522] Non-viral vector delivery systems can include DNA plasmids, RNA (e.g., a transcript of a vector described herein), naked nucleic acid, and nucleic acid complexed with a delivery vehicle, such as a liposome. In some embodiments, the polynucleotide is provided as an RNA, e.g., a mRNA or a transcript. Any RNA of the prime editing systems, for example a guide RNA or a prime editor-encoding mRNA, can be delivered in the form of RNA. In some embodiments, one or more components of the prime editing system that are RNAs is produced by direct chemical synthesis or may be transcribed in vitro from a DNA. In some embodiments, an mRNA that encodes a prime editor polypeptide is generated using in vitro transcription. Guide polynucleotides (e.g., PEgRNA or ngRNA) can also be transcribed using in vitro transcription from a cassette containing a T7 promoter, followed by the sequence “GG”, and guide polynucleotide sequence. In some embodiments, the prime editor encoding mRNA, PEgRNA, and/or ngRNA are synthesized in vitro using an RNA polymerase enzyme (e.g., T7 polymerase, T3 polymerase, SP6 polymerase, etc.). Once synthesized, the RNA can directly contact a double stranded target DNA, e.g., a target gene, or can be introduced into a cell using any suitable technique for introducing nucleic acids into cells (e.g., microinjection, electroporation, transfection). In some embodiments, the prime editor-coding sequences, the PEgRNAs, and/or the ngRNAs are modified to include one or more modified nucleoside e.g., using pseudo-U or 5-Methyl-C.

[0523] Methods of non-viral delivery of nucleic acids can include lipofection, nucleofection, electroporation, microinjection, biolistics, virosomes, liposomes, immunoliposomes, cell penetrating peptides, polycation or lipid:nucleic acid conjugates, naked DNA, artificial virions, cell membrane disruption by a microfluidics device, and agent-enhanced uptake of DNA. Cationic and neutral lipids that are suitable for efficient receptor-recognition lipofection of polynucleotides can be used. Delivery can be to cells (e.g., in vitro or ex vivo administration) or target tissues (e.g., in vivo administration). The preparation of lipid:nucleic acid complexes, including targeted liposomes such as immunolipid complexes, can be used.

[0524] Viral vector delivery systems can include DNA and RNA viruses, which can have either episomal or integrated genomes after delivery to the cell. RNA or DNA viral based systems can be used to target specific cells and trafficking the viral payload to an organelle of the cell. Viral vectors can be administered directly (in vivo) or they can be used to treat cells in vitro, and the modified cells can optionally be administered (ex vivo).

[0525] In some embodiments, the viral vector is a retroviral, lentiviral, adenoviral, adeno-associated viral or herpes simplex viral vector. Retroviral vectors can include those based upon murine leukemia virus (MuLV), gibbon ape leukemia virus (GaLV), Simian Immunodeficiency virus (SIV), human immunodeficiency virus (HIV), and combinations thereof. In some embodiments, the retroviral vector is a lentiviral vector. In some embodiments, the retroviral vector is a gamma retroviral vector. In some embodiments, the viral vector is an adenoviral vector. In some embodiments, the viral vector is an adeno-associated virus (“AAV”) vector. In some embodiments, the AAV is a recombinant AAV (rAAV).

[0526] In some embodiments, polynucleotides encoding one or more prime editing composition components are packaged in a virus particle. Packaging cells can be used to form virus particles that can infect a target cell. Such cells can include 293 cells, (e.g., for packaging adenovirus), and ψ2 cells or PA317 cells (e.g., for packaging retrovirus). Viral vectors can be generated by producing a cell line that packages a nucleic acid vector into a viral particle. The vectors can contain the minimal viral sequences required for packaging and subsequent integration into a host. The vectors can contain other viral sequences being replaced by an expression cassette for the polynucleotide(s) to be expressed. The missing viral functions can be supplied in trans by the packaging cell line. For example, AAV vectors can comprise ITR sequences from the AAV genome which are required for packaging and integration into the host genome.

[0527] In some embodiments, dual AAV vectors are generated by splitting a large transgene expression cassette in two separate halves (5′ and 3′ ends that encode N-terminal portion and C-terminal portion of, e.g., a prime editor polypeptide), where each half of the cassette is no more than 5 kb in length, optionally no more than 4.7 kb in length, and is packaged in a single AAV vector. In some embodiments, the full-length transgene expression cassette is reassembled upon co-infection of the same cell by both dual AAV vectors. In some embodiments, a portion or fragment of a prime editor polypeptide, e.g., a Cas9 nickase, is fused to an intein. The portion or fragment of the polypeptide can be fused to the N-terminus or the C-terminus of the intein. In some embodiments, a N-terminal portion of the polypeptide is fused to an intein-N, and a C-terminal portion of the polypeptide is separately fused to an intein-C. In some embodiments, a portion or fragment of a prime editor fusion protein is fused to an intein and fused to an AAV capsid protein. The intein, nuclease and capsid protein can be fused together in any arrangement (e.g., nuclease-intein-capsid, intein-nuclease-capsid, capsid-intein-nuclease, etc.). In some embodiments, a polynucleotide encoding a prime editor fusion protein is split in two separate halves, each encoding a portion of the prime editor fusion protein and separately fused to an intein. In some embodiments, each of the two halves of the polynucleotide is packaged in an individual AAV vector of a dual AAV vector system. In some embodiments, each of the two halves of the polynucleotide is no more than 5 kb in length, optionally no more than 4.7 kb in length. In some embodiments, the full-length prime editor fusion protein is reassembled upon co-infection of the same cell by both dual AAV vectors, expression of both halves of the prime editor fusion protein, and self-excision of the inteins. In some embodiments, the in vivo use of dual AAV vectors results in the expression of full-length full-length prime editor fusion proteins. In some embodiments, the use of the dual AAV vector platform allows viable delivery of transgenes of greater than about 4.5, 4.6, 4.7, 4.8, 4.9, or 5.0 kb in size. A target cell can be transiently or non-transiently transfected with one or more vectors described herein. A cell can be transfected as it naturally occurs in a subject. A cell can be taken or derived from a subject and transfected. A cell can be derived from cells taken from a subject, such as a cell line. In some embodiments, a cell transfected with one or more vectors described herein can be used to establish a new cell line comprising one or more vector-derived sequences. In some embodiments, a cell transiently transfected with the compositions of the disclosure (such as by transient transfection of one or more vectors, or transfection with RNA), and modified through the activity of a prime editor, can be used to establish a new cell line comprising cells containing the modification but lacking any other exogenous sequence. Any suitable vector compatible with the host cell can be used with the methods of the disclosure. Non-limiting examples of vectors include pXT1, pSG5, pSVK3, pBPV, pMSG, and pSVLSV40.

[0528] In some embodiments, a prime editor protein can be provided to cells as a polypeptide. In some embodiments, the prime editor protein is fused to a polypeptide domain that increases solubility of the protein. In some embodiments, the prime editor protein is formulated to improve solubility of the protein.

[0529] In some embodiment, a prime editor polypeptide is fused to a polypeptide permeant domain to promote uptake by the cell. In some embodiments, the permeant domain is a including peptide, a peptidomimetic, or a non-peptide carrier. For example, a permeant peptide may be derived from the third alpha helix of Drosophila melanogaster transcription factor Antennapaedia, referred to as penetratin, which comprises the amino acid sequence RQIKIWFQNRRMKWKK (SEQ ID NO: 841). As another example, the permeant peptide can comprise the HIV-1 tat basic region amino acid sequence, which may include, for example, amino acids 49-57 of naturally-occurring tat protein. Other permeant domains can include poly-arginine motifs, for example, the region of amino acids 34-56 of HIV-1 rev protein, nona-arginine (SEQ ID NO: 842), and octa-arginine (SEQ ID NO: 836). The nona-arginine (R9) sequence (SEQ ID NO: 842) can be used. The site at which the fusion can be made may be selected in order to optimize the biological activity, secretion or binding characteristics of the polypeptide.

[0530] In some embodiments, a prime editor polypeptide is produced in vitro or by host cells, and it may be further processed by unfolding, e.g., heat denaturation, DTT reduction, etc. and may be further refolded. In some embodiments, a prime editor polypeptide is prepared by in vitro synthesis. Various commercial synthetic apparatuses can be used. By using synthesizers, naturally occurring amino acids can be substituted with unnatural amino acids. In some embodiments, a prime editor polypeptide is isolated and purified in accordance with recombinant synthesis methods, for example, by expression in a host cell and the lysate purified using HPLC, exclusion chromatography, gel electrophoresis, affinity chromatography, or other purification technique.

[0531] In some embodiments, a prime editing composition, for example, prime editor polypeptide components and PEgRNA/ngRNA are introduced to a target cell by nanoparticles. In some embodiments, the prime editor polypeptide components and the PEgRNA and/or ngRNA form a complex in the nanoparticle. Any suitable nanoparticle design can be used to deliver genome editing system components or nucleic acids encoding such components. In some embodiments, the nanoparticle is inorganic. In some embodiments, the nanoparticle is organic. In some embodiments, a prime editing composition is delivered to a target cell, e.g., a hepatocyte, in an organic nanoparticle, e.g., a lipid nanoparticle (LNP) or polymer nanoparticle.

[0532] In some embodiments, LNPs are formulated from cationic, anionic, neutral lipids, or combinations thereof. In some embodiments, neutral lipids, such as the fusogenic phospholipid DOPE or the membrane component cholesterol, are included to enhance transfection activity and nanoparticle stability. In some embodiments, LNPs are formulated with hydrophobic lipids, hydrophilic lipids, or combinations thereof. Lipids may be formulated in a wide range of molar ratios to produce an LNP. Any lipid or combination of lipids that are known in the art can be used to produce an LNP. Exemplary lipids used to produce LNPs are provided in Table 4 below.

[0533] In some embodiments, components of a prime editing composition form a complex prior to delivery to a target cell. For example, a prime editor fusion protein, a PEgRNA, and/or a ngRNA can for a complex prior to delivery to the target cell. In some embodiments, a prime editing polypeptide (e.g., a prime editor fusion protein) and a guide polynucleotide (e.g., a PEgRNA or ngRNA) form a ribonucleoprotein (RNP) for delivery to a target cell. In some embodiments, the RNP comprises a prime editor fusion protein in complex with a PEgRNA. RNPs may be delivered to cells using known methods, such as electroporation, nucleofection, or cationic lipid-mediated methods, or any other approaches known in the art. In some embodiments, delivery of a prime editing composition or complex to the target cell does not require the delivery of foreign DNA into the cell. In some embodiments, the RNP comprising the prime editing complex is degraded over time in the target cell. Exemplary lipids for use in nanoparticle formulations and/or gene transfer are shown in Table 4 below.

TABLE 4
Exemplary lipids for nanoparticle formulation or gene transfer

| | Abbrevi- | |
|---|---|---|
| Lipid | ation | Feature |
| 1,2-Dioleoyl-sn-glycero-3- | DOPC | Helper |
| phosphatidylcholine | | |
| 1,2-Dioleoyl-sn-glycero-3- | DOPE | Helper |
| phosphatidylethanolamine | | |
| Cholesterol | | Helper |
| N41-(2,3-Dioleyloxy)prophyliN,N,N- | DOTMA | Cationic |
| trimethylammonium chloride | | |
| 1,2-Dioleoyloxy-3-trimethylammonium- | DOGS | Cationic |
| propane Dioctadecylamidoglycylspermine | | |
| N-(3-Aminopropy1)-N,N-dimethy1-2,3- | GAP- | Cationic |
| bis(dodecyloxy)-1-propanaminium bromide | DLRIE | |
| Cetyltrimethylammonium bromide | CTAB | Cationic |
| 6-Lauroxyhexyl omithinate | LHON | Cationic |
| 1-(2,3-Dioleoyloxypropy1)-2,4,6- | 2Oc | Cationic |
| trimethylpyridinium | | |
| 2,3-Dioleyloxy-N-P(spenninecarboxamido- | DOSPA | Cationic |
| ethy 1J-N,Ndimethyl-1-propanatninium | | |
| trifluoroacetate | | |
| 1,2-Dioley1-3-trimethylamtnonium-propane | DOPA | Cationic |
| N-(2-Hydroxyethyl)-N,N-dimethy1-2,3- | MDRIE | Cationic |
| bis(tetradecyloxy)-1-propanaminium | | |
| bromide | | |
| Dimyristooxypropyl dimethyl hydroxyethyl | DMRI | Cationic |
| ammonium bromide | | |
| 3β-[N-(N′,N′-Dimethylaminoethane)- | DC-Chol | Cationic |
| carbamoyl]cholesterol | | |
| Bis-guanidium-tren-cholesterol | BGTC | Cationic |
| 1,3-Diodeoxy-2-(6-carboxy-spermy1)- | DOSPER | Cationic |
| propylamide | | |
| Dimethyloctadecylammonium bromide | DDAB | Cationic |
| Dioctadecylamidoglicylspermidin | DSL | Cationic |
| rac-[(2,3-Dioctadecyloxypropyl)(2-hydro- | CLIP-1 | Cationic |
| xyethyl)]-dimethylammonium chloride | | |
| rac-[2(2,3-Dihexadecyloxypropyloxy- | CLIP-6 | Cationic |
| methyloxy)ethyl]trimethylammoniun | | |
| bromide | | |
| Ethyldimyristoylphosphatidylcholine | EDMPC | Cationic |
| 1,2-Distearyloxy-N,N-dimethyl-3- | DSDMA | Cationic |
| aminopropane | | |
| 1,2-Dimyristoyl-trimethylammonium | DMTAP | Cationic |
| propane | | |
| O,O′-Dimyristyl-N-lysyl aspartate | DMKE | Cationic |
| 1,2-Distearoyl-sn-glycero-3-ethylpho | DSEPC | Cationic |
| sphocholine | | |
| N-Palmitoyl D-erythro-sphingosyl | CCS | Cationic |
| carbamoyl-spenmine | | |
| N-t-Butyl-N0-tetradecyl-3- | diC14- | Cationic |
| tetradecylaminopropionamidine | amidine | |
| Octadecenolyoxy[ethyl-2-heptadecenyl-3 | DOTIM | Cationic |
| hydroxyethyl]imidazolinium chloride | | |
| N1-Cholesteryloxycarbonyl-3,7- | CDAN | Cationic |
| diazanonane-1,9-diamine | | |
| 2-(3-Bis(3-amino-propy1)-amino]propyl- | RPR209120 | Cationic |
| amino)-Nditetradecylcarbamoylme- | | |
| ethyl-acetamide | | |
| 1,2-dilinoleyloxy-3-dimethylaminopropane | DLinDMA | Cationic |
| 2,2-dilinoley1-4-dimethylaminoethyl- | DLin-KC2- | Cationic |
| [1,3]-dioxolane | DMA | |
| dilinoleyl-methyl-4-dimethylaminobutyrate | DLin-MC3- | Cationic |
| | DMA | |

[0534] Exemplary polymers for use in nanoparticle formulations and/or gene transfer are shown in Table 5 below.

TABLE 5
Exemplary lipids for
nanoparticle formulation or gene transfer

| Polymer | Abbreviation |
|---|---|
| Poly(ethylene)glycol | PEG |
| Polyethylenimine | PEI |
| Dithiobis (succinimidylpropionate) | DSP |
| Dimethyl-3,3′-dithiobispropionimidate | DTBP |
| Poly(ethylene imine)biscarbamate | PEIC |
| Poly(L-lysine) | PLL |
| Histidine modified PLL | |
| Poly(N-vinylpyrrolidone) | PVP |
| Poly(propylenimine) | PPI |
| Poly(amidoamine) | PAMAM |
| Poly(amidoethylenimine) | SS_PAEI |
| Triethylenetetramine | TETA |
| Poly(β-aminoester) | |
| Poly(4-hydroxy-L-proline ester) | PHP |
| Poly(allylamine) | |
| Poly(α-[4-aminobutyl]-L-glycolic acid) | PAGA |
| Poly(D,L-lactic-co-glycolic acid) | PLGA |
| Poly(N-ethyl-4-vinylpyridinium bromide) | |
| Poly(phosphazene)s | PPZ |
| Poly(phosphoester)s | PPE |
| Poly(phosphoramidate)s | PPA |
| Poly(N-2-hydroxypropylmethacrylamide) | pHPMA |
| Poly (2-(dimethylamino)ethyl methacrylate) | pDMAEMA |
| Poly(2-aminoethyl propylene phosphate) | PPE-EA |
| Chitosan | |
| Galactosylated chitosan | |
| N-dodacylated chitosam | |
| Histone | |
| Collagen | |
| Dextran-spermine | D-SPM |

[0535] Exemplary delivery methods for polynucleotides encoding prime editing composition components are shown in Table 6 below.

TABLE 6
Exemplary polynucleotide delivery methods

| | | Delivery | | | |
|---|---|---|---|---|---|
| | | into | Duration | | |
| | | Non- | of | Genome | Type of |
| | Vector/ | Dividing | Ex- | Inte- | Molecule |
| Delivery | Mode | Cells | pression | gration | Delivered |
| Physical | (e.g., | YES | Transient | NO | Nucleic |
| | electro- | | | | Acids |
| | poration, | | | | and |
| | particle gun, | | | | Proteins |
| | Calcium | | | | |
| | phosphate | | | | |
| | transfection) | | | | |
| Viral | Retrovirus | NO | Stable | YES | RNA |
| | Lentivirus | YES | Stable | YES/NO | RNA |
| | | | | with | |
| | | | | modifi- | |
| | | | | cation | |
| | Adenovirus | YES | Transient | NO | DNA |
| | Adeno- | YES | Stable | NO | DNA |
| | Associated | | | | |
| | Virus (AAV) | | | | |
| | Vaccinia | YES | Very | NO | DNA |
| | Virus | | Transient | | |
| | Herpes | YES | Stable | NO | DNA |
| | Simplex | | | | |
| | Virus | | | | |
| Non- | Cationic | YES | Transient | Depends | Nucleic |
| Viral | | | | on | acids |
| | | | | what is | and |
| | | | | delivered | Proteins |
| | Polymeric | YES | Transient | NO | Nucleic |
| | Nanoparticles | | | | Acids |
| Bio- | Attenuated | YES | Transient | NO | Nucleic |
| logical | Bacteria | | | | Acids |
| Non- | Engineered | YES | Transient | NO | Nucleic |
| Viral | Bacteriophages | | | | Acids |
| Delivery | Mammalian | YES | Transient | NO | Nucleic |
| Vehicles | Virus-like | | | | Acids |
| | Particles | | | | |
| | Biological | YES | Transient | NO | Nucleic |
| | liposomes: | | | | Acids |
| | Erythrocyte | | | | |
| | Ghosts and | | | | |
| | Exosomes | | | | |

[0536] The prime editing compositions of the disclosure, whether introduced as polynucleotides or polypeptides, can be provided to the cells for about 30 minutes to about 24 hours, e.g., 1 hour, 1.5 hours, 2 hours, 2.5 hours, 3 hours, 3.5 hours 4 hours, 5 hours, 6 hours, 7 hours, 8 hours, 12 hours, 16 hours, 18 hours, 20 hours, or any other period from about 30 minutes to about 24 hours, which can be repeated with a frequency of about every day to about every 4 days, e.g., every 1.5 days, every 2 days, every 3 days, or any other frequency from about every day to about every four days. The compositions may be provided to the subject cells one or more times, e.g., one time, twice, three times, or more than three times, and the cells allowed to incubate with the agent(s) for some amount of time following each contacting event e.g., 16-24 hours. In cases in which two or more different prime editing system components, e.g., two different polynucleotide constructs are provided to the cell (e.g., different components of the same prime editing system, or two different guide nucleic acids that are complementary to different sequences within the same or different double stranded target DNA, e.g., a target genes), the compositions may be delivered simultaneously (e.g., as two polypeptides and/or nucleic acids). Alternatively, they may be provided sequentially, e.g., one composition being provided first, followed by a second composition.

[0537] The prime editing compositions and pharmaceutical compositions of the disclosure, whether introduced as polynucleotides or polypeptides, can be administered to subjects in need thereof for about 30 minutes to about 24 hours, e.g., 1 hour, 1.5 hours, 2 hours, 2.5 hours, 3 hours, 3.5 hours 4 hours, 5 hours, 6 hours, 7 hours, 8 hours, 12 hours, 16 hours, 18 hours, 20 hours, or any other period from about 30 minutes to about 24 hours, which can be repeated with a frequency of about every day to about every 4 days, e.g., every 1.5 days, every 2 days, every 3 days, or any other frequency from about every day to about every four days. The compositions may be provided to the subject one or more times, e.g., one time, twice, three times, or more than three times. In cases in which two or more different prime editing system components, e.g., two different polynucleotide constructs are administered to the subject (e.g., different components of the same prime editing system, or two different guide nucleic acids that are complementary to different sequences within the same or different double stranded target DNA, e.g., a target genes), the compositions may be administered simultaneously (e.g., as two polypeptides and/or nucleic acids). Alternatively, they may be provided sequentially, e.g., one composition being provided first, followed by a second composition.

Lengthy table referenced here
US20240228988A1-20240711-T00001
Please refer to the end of the specification for access instructions.

Lengthy table referenced here
US20240228988A1-20240711-T00002
Please refer to the end of the specification for access instructions.

Lengthy table referenced here
US20240228988A1-20240711-T00003
Please refer to the end of the specification for access instructions.

Lengthy table referenced here
US20240228988A1-20240711-T00004
Please refer to the end of the specification for access instructions.

Lengthy table referenced here
US20240228988A1-20240711-T00005
Please refer to the end of the specification for access instructions.

Lengthy table referenced here
US20240228988A1-20240711-T00006
Please refer to the end of the specification for access instructions.

Lengthy table referenced here
US20240228988A1-20240711-T00007
Please refer to the end of the specification for access instructions.

Lengthy table referenced here
US20240228988A1-20240711-T00008
Please refer to the end of the specification for access instructions.

Lengthy table referenced here
US20240228988A1-20240711-T00009
Please refer to the end of the specification for access instructions.

Lengthy table referenced here
US20240228988A1-20240711-T00010
Please refer to the end of the specification for access instructions.

Lengthy table referenced here
US20240228988A1-20240711-T00011
Please refer to the end of the specification for access instructions.

Lengthy table referenced here
US20240228988A1-20240711-T00012
Please refer to the end of the specification for access instructions.

Lengthy table referenced here
US20240228988A1-20240711-T00013
Please refer to the end of the specification for access instructions.

Lengthy table referenced here
US20240228988A1-20240711-T00014
Please refer to the end of the specification for access instructions.

Lengthy table referenced here
US20240228988A1-20240711-T00015
Please refer to the end of the specification for access instructions.

Lengthy table referenced here
US20240228988A1-20240711-T00016
Please refer to the end of the specification for access instructions.

Lengthy table referenced here
US20240228988A1-20240711-T00017
Please refer to the end of the specification for access instructions.

Lengthy table referenced here
US20240228988A1-20240711-T00018
Please refer to the end of the specification for access instructions.

Lengthy table referenced here
US20240228988A1-20240711-T00019
Please refer to the end of the specification for access instructions.

Lengthy table referenced here
US20240228988A1-20240711-T00020
Please refer to the end of the specification for access instructions.

Lengthy table referenced here
US20240228988A1-20240711-T00021
Please refer to the end of the specification for access instructions.

Lengthy table referenced here
US20240228988A1-20240711-T00022
Please refer to the end of the specification for access instructions.

Lengthy table referenced here
US20240228988A1-20240711-T00023
Please refer to the end of the specification for access instructions.

Lengthy table referenced here
US20240228988A1-20240711-T00024
Please refer to the end of the specification for access instructions.

Lengthy table referenced here
US20240228988A1-20240711-T00025
Please refer to the end of the specification for access instructions.

Lengthy table referenced here
US20240228988A1-20240711-T00026
Please refer to the end of the specification for access instructions.

Lengthy table referenced here
US20240228988A1-20240711-T00027
Please refer to the end of the specification for access instructions.

Lengthy table referenced here
US20240228988A1-20240711-T00028
Please refer to the end of the specification for access instructions.

Lengthy table referenced here
US20240228988A1-20240711-T00029
Please refer to the end of the specification for access instructions.

Lengthy table referenced here
US20240228988A1-20240711-T00030
Please refer to the end of the specification for access instructions.

Lengthy table referenced here
US20240228988A1-20240711-T00031
Please refer to the end of the specification for access instructions.

Lengthy table referenced here
US20240228988A1-20240711-T00032
Please refer to the end of the specification for access instructions.

Lengthy table referenced here
US20240228988A1-20240711-T00033
Please refer to the end of the specification for access instructions.

Lengthy table referenced here
US20240228988A1-20240711-T00034
Please refer to the end of the specification for access instructions.

Lengthy table referenced here
US20240228988A1-20240711-T00035
Please refer to the end of the specification for access instructions.

Lengthy table referenced here
US20240228988A1-20240711-T00036
Please refer to the end of the specification for access instructions.

Lengthy table referenced here
US20240228988A1-20240711-T00037
Please refer to the end of the specification for access instructions.

Lengthy table referenced here
US20240228988A1-20240711-T00038
Please refer to the end of the specification for access instructions.

Lengthy table referenced here
US20240228988A1-20240711-T00039
Please refer to the end of the specification for access instructions.

Lengthy table referenced here
US20240228988A1-20240711-T00040
Please refer to the end of the specification for access instructions.

Lengthy table referenced here
US20240228988A1-20240711-T00041
Please refer to the end of the specification for access instructions.

Lengthy table referenced here
US20240228988A1-20240711-T00042
Please refer to the end of the specification for access instructions.

Lengthy table referenced here
US20240228988A1-20240711-T00043
Please refer to the end of the specification for access instructions.

Lengthy table referenced here
US20240228988A1-20240711-T00044
Please refer to the end of the specification for access instructions.

Lengthy table referenced here
US20240228988A1-20240711-T00045
Please refer to the end of the specification for access instructions.

Lengthy table referenced here
US20240228988A1-20240711-T00046
Please refer to the end of the specification for access instructions.

Lengthy table referenced here
US20240228988A1-20240711-T00047
Please refer to the end of the specification for access instructions.

Lengthy table referenced here
US20240228988A1-20240711-T00048
Please refer to the end of the specification for access instructions.

Lengthy table referenced here
US20240228988A1-20240711-T00049
Please refer to the end of the specification for access instructions.

Lengthy table referenced here
US20240228988A1-20240711-T00050
Please refer to the end of the specification for access instructions.

Lengthy table referenced here
US20240228988A1-20240711-T00051
Please refer to the end of the specification for access instructions.

Lengthy table referenced here
US20240228988A1-20240711-T00052
Please refer to the end of the specification for access instructions.

Lengthy table referenced here
US20240228988A1-20240711-T00053
Please refer to the end of the specification for access instructions.

Lengthy table referenced here
US20240228988A1-20240711-T00054
Please refer to the end of the specification for access instructions.

Lengthy table referenced here
US20240228988A1-20240711-T00055
Please refer to the end of the specification for access instructions.

### EXAMPLES

[0538] The following examples are provided for illustrative purposes only and are not intended to limit the scope of the claims provided herein.

### Example 1. Prime Editors Comprising a Codon-Optimized Reverse Transcriptase Domain

[0539] Polynucleotide sequences that encode a prime editor fusion protein having the structure of SV40BPNLS-Cas9H840A-[(SGGS)2-XTEN-(SGGS)2-S]-MMLVRT5M-SGGS-SV40BPNLS1 (amino acid SEQ ID NO: 25) were engineered. Codon optimization was performed for the polynucleotide sequence encoding the C-terminal portion, [(SGGS)2-XTEN-(SGGS)2-S]-MMLVRT5M-SGGS-SV40BPNLS1] of the fusion protein. Codons encoding the indicated C-terminal portion of the fusion protein were optimized to use frequent codons in human genome and improve mRNA stability. For the remaining N-terminal portion (SV40BPNLS-Cas9H840A) of the fusion protein, the polynucleotide sequence that encode the same fusion protein as published in Anzalone Nature 576(7785):149-157 (2019) was used.

[0540] 144 codon optimized RNA sequences that encode the above-described prime editor fusion protein were designed, and the coding sequences are provided in SEQ ID Nos 412-555. Three codon optimized mRNAs, named PE-C2 (SEQ ID NO: 244), PE-C3 (SEQ ID NO: 234), and PE-C4 (SEQ ID NO: 256), were compared to the up-optimized control mRNA sequence that encodes the same fusion protein, which comprises the sequence of SEQ ID NO: 27 and is referred to here after as the PE-AA2019 mRNA. The codon optimized sequence encoding the RT portion of each of PE-C2, PE-C3, and PE-C4 are provided in SEQ ID Nos. 245, 83, and 257, respectively. The PE-C2, PE-C3, PE-C4, and PE-AA2019 mRNAs were in vitro transcribed. An mRNA encoding the Streptococcus pyogenes Cas9 (SpCas9) nuclease was also in vitro transcribed to serve as a negative control. RNA sequences and corresponding DNA sequences of each of PE-C2, PE-C3, PE-C4, and PE-AA2019, as well as sequences encoding each component, are provided in Table 15. For mRNA resulted from in vitro transcription, a 5′UTR was added to the 5′ end and a “TAA” stop codon followed by a 3′UTR was added to the 3′ end of each of the mRNAs. Sequence encoding UTR sequences are provided in SEQ ID Nos 640 and 645, Table 68.

[0541] Each mRNA was electroporated (ATx, Maxcyte) into healthy human donor CD34+ cells along with a prime editing guide RNA (pegRNA) and a nick guide RNA (ngRNA) designed to introduce a T>A nucleotide substitution (the sickle cell mutation that results in the amino acid substitution known as “E6V” associated with sickle cells disease) into a wild type HBB gene. Sequences of the pegRNA and the ngRNA are provided below:

pegRNA sequence: (5′-3′)
(SEQ ID NO: 559)
mC*mA*mU*GGUGCACCUGACUCCUGGUUUUAGAGCUAGAAAUAG
CAAGUUAAAAUAAGGCUAGUCCGUUAUCAACUUGAAAAAGUGGGA
CCGAGUCGGUGCAGACUUCUCCACAGGAGUCAGGUGCACmU*mU*
mU*U
ngRNA sequence: (5′-3′)
(SEQ ID NO: 564)
mC*mC*mU*UGAUACCAACCUGCCCAGUUUUAGAGCUAGAAAUAG
CAAGUUAAAAUAAGGCUAGUCCGUUAUCAACUUGAAAAAGUGGGA
CCGAGUCGGUGCmU*mU*mU*U

[0542] In any instance where a guide RNA sequence is listed, * indicates phosphorothioate linkage, and ‘m’ indicates 2′OMe modification.

[0543] 200 nM of the prime editor-encoding mRNAs, 20 μM of pegRNA and 11 μM of nick guide RNA were used for each electroporation. Prime editing efficiency was examined at three time points: 24 hours, 72 hours, and 120 hours post electroporation, respectively. For each time point, two biological replicates were included for each of the prime editor-encoding mRNAs, and one replicate was used for the SpCas9 control. Genomic DNA was extracted and sequenced with Illumina Miseq Next Generation Sequencing (NGS) at each of the three time points.

[0544] Prime editing efficiency of each of the prime editor encoding mRNA is summarized in Table 7. Improved prime editing efficiency with codon optimized constructs, particularly in PE-C3, was observed.

TABLE 7
prime editing efficiency (%) using prime editors encoded by codon-optimized mRNA

| | Cas9 | PE-C2 | | PE-C3 | | PE-C4 | | PE AA2019 | | No treatment | |
|---|---|---|---|---|---|---|---|---|---|---|---|
| Editing | 0.02 | 2.45 | 2.21 | 4.5 | 3.53 | 2.57 | 2.98 | 3.65 | 1.33 | 0.24 | 0.33 |
| efficiency | | | | | | | | | | | |
| (%) 24 h | | | | | | | | | | | |
| Editing | 0.03 | 6.59 | 5.35 | 11.17 | 10.72 | 9.73 | 7.04 | 7.77 | 3.97 | 0.08 | 0.02 |
| efficiency | | | | | | | | | | | |
| (%) 72 h | | | | | | | | | | | |
| Editing | 0.03 | 8.37 | 8.28 | 13.85 | 13.06 | 9.09 | 8.57 | 8.79 | 5.07 | 0 | 0 |
| efficiency | | | | | | | | | | | |
| (%) 120 h | | | | | | | | | | | |

[0545] The level of the prime editor protein (or the SpCas9 control) in the CD34+ cells were also accessed. 24 hours post electroporation, protein was harvested from the CD34+ cells and quantified by capillary Western blot assay (Jess, ProteinSimple) using an anti-Cas9 primary antibody. For PE-C3, only one of the two biological replicates was measured for prime editor protein level. Samples were normalized by total protein concentration using a bicinchoninic acid (BCA) quantification (ThermoFisher) prior to running the capillary Western blot. Protein was quantified by measuring the area under the curve for a detected peak at 160 kDa (±10%) for Cas9 quantification or 230 kDa (±10%) for the prime editor peak. The result is summarized in Table 8:

TABLE 8
protein expression level in CD34+ cells after electroporation

| | Cas9 | PE-C2 | | PE-C3 | PE-C4 | | PE AA2019 | | No treatment | |
|---|---|---|---|---|---|---|---|---|---|---|
| Cas9 | 249365 | n.d. | 2173 | 436 | 887 | n.d. | n.d. | n.d. | 1138 | 623 |
| peak area | | | | | | | | | | |
| (160 kDa) | | | | | | | | | | |
| Prime editor | 2613 | 13936 | 30682 | 48270 | 44067 | 11732 | 21140 | 6453 | n.d. | 387 |
| peak area | | | | | | | | | | |
| (230 kDa) | | | | | | | | | | |

### Example 2. Prime Editors with Optimized Linkers

[0546] In this experiment, the peptide linker connecting the Cas9 domain and the RT domain of a prime editor fusion protein was optimized. 22 prime editor fusion proteins were designed, each having the following structure:
[0547] SV40BPNLS-Cas9H840A-[LINKER]-MMLVRT5M-SGGS-SV40BPNLS1

[0548] Where [LINKER] indicates a different peptide linker in each of the 22 fusion proteins. The prime editor fusion protein as described in Example 1, having the structure of SV40BPNLS-Cas9H840A-[(SGGS)2-XTEN-(SGGS)2-S]-MMLVRT5M-SGGS-SV40BPNLS1, was used as a control for comparison with the 22 prime editor fusion proteins having alternative linkers. An mRNA sequence encoding each of the 22 fusion proteins and the control fusion protein was in vitro transcribed. In each of the 22 mRNA sequences encoding the linker variant fusion proteins, the portion that encodes the MMLVRT was codon-optimized and has the same sequence as the sequence encoding the MMLVRT in PE-C3 as described in Example 1 (SEQ ID NO: 234). The codon optimized RNA sequence encoding MMLVRT5M, referred to as MMLVRT-C3, is provided in SEQ ID No 84 and corresponding DNA sequence in SEQ ID No 83. The control prime editor fusion protein is encoded by the PE-C3 optimized mRNA, the coding sequence of which is in SEQ ID NO:234. For mRNA resulted from in vitro transcription, a 5′UTR was added to the 5′ end and a “TAA” stop codon followed by a 3′UTR (sequence provided in Table 68) was added to the 3′ end of each of the mRNAs.

[0549] A HEK293T cell line was generated to contain the sickle cell mutation in the HBB gene in a homozygous manner. A pegRNA and ngRNA pair were designed to edit the sickle cell mutation locus in the HEK293T cells and chemically synthesized:

pegRNA sequence: (5′-3′)
(SEQ ID NO: 569)
mC*mA*mU*GGUGCACCUGACUCCUGGUUUUAGAGCUAGAAAUAG
CAAGUUAAAAUAAGGCUAGUCCGUUAUCAACUUGAAAAAGUGGCA
CCGAGUCGGUGCAGACUUCUCUUCAGGAGUCAGGUGCACmU*mU*
mU*U
ngRNA sequence: (5′-3′)
(SEQ ID NO: 574)
mC*mC*mU*UGAUACCAACCUGCCCAGUUUUAGAGCUAGAAAUAG
CAAGUUAAAAUAAGGCUAGUCCGUUAUCAACUUGAAAAAGUGGCA
CCGAGUCGGUGCmU*mU*mU*U

[0550] mRNAs encoding the 22 fusion proteins and the control fusion protein were introduced into the HEK293T cells by lipofection, using MessengerMax™ lipid reagent (ThermoFisher). 4000 ng of mRNA, 250 ng of pegRNA and 75 ng of ng RNA were used for each well. For each of the prime editor-encoding mRNAs, two technical replicates were examined. 3 days post lipofection, genomic DNA was harvested and sequenced using Illumina NGS as described above to measure prime editing efficiency and indel frequencies. The result is summarized in Table 9. Compared to the control linker (SGGS)2-XTEN(SGGS)2-S, prime editors with alternative linkers exhibit improved editing efficiency.

TABLE 9
prime editing efficiency with linker optimized prime editors

| Linker | Editing | | Indel | | Corresponding |
|---|---|---|---|---|---|
| SEQ | efficiency | | Frequency | | Sequence |
| ID | (/%) | | (/%) | | Table No. |
| 289 | 44.15 | 47.38 | 1 | 1.1 | 25 |
| 301 | 69.38 | 58.3 | 1.4 | 1.7 | 60 |
| 302 | 67.76 | 67.32 | 1.8 | 2.1 | 16 |
| 303 | 65.52 | 57.88 | 2 | 1.8 | 58 |
| 304 | 55.56 | 53.1 | 1.5 | 1.4 | 56 |
| 305 | 43.88 | 51.48 | 0.8 | 1.4 | 54 |
| 290 | 51.26 | 50.95 | 1.1 | 1.5 | 64 |
| 291 | 54.91 | 55.12 | 1.1 | 1.5 | 62 |
| 296 | 61.17 | 61.03 | 1.5 | 1.7 | 52 |
| 292 | 59.37 | 57.19 | 1.7 | 1.6 | (SGGS)2- |
| | | | | | XTEN-SGGS |
| | | | | | linker control |
| 293 | 61.06 | 62.86 | 1.5 | 1.2 | 50 |
| 294 | 62.06 | 65.11 | 1.4 | 1.5 | 48 |
| 295 | 69.17 | 60.85 | 1.6 | 1.7 | 46 |
| 297 | 53.92 | 48.54 | 1.2 | 1.2 | 44 |
| 298 | 50.25 | 48.56 | 1.2 | 1.4 | 42 |
| 299 | 57.39 | 50.25 | 1.3 | 1.5 | 40 |
| 300 | 59.97 | 50.37 | 1.7 | 1.4 | 38 |
| 306 | 41.63 | 53.61 | 1.2 | 1.5 | 28 |
| 307 | 51.56 | 53.23 | 1.3 | 1.3 | 36 |
| 309 | 40.85 | 53.22 | 1 | 1.3 | 34 |
| 308 | 47.17 | 45.13 | 1 | 1 | 34 |
| 310 | 59.45 | 64.25 | 1.2 | 1.9 | 32 |
| 311 | 63.93 | 60.9 | 1.9 | 1.9 | 30 |

[0551] A subset of the prime editors with optimized linkers were further tested in healthy human donor CD34+ cells for editing the HBB locus, a pegRNA and a ngRNA were designed to target the HBB locus:

pegRNA sequence: (5′-3′)
(SEQ ID NO: 579)
mC*mA*mU*GGUGCACCUGACUCCUGGUUUUAGAGCUAGAAAUAG
CAAGUUAAAAUAAGGCUAGUCCGUUAUCAACUUGAAAAAGUGGCA
CCGAGUCGGUGCAGACUUCUCUACAGGAGUCAGGUGCACmU*mU*
mU*U
nickRNA sequence: (5′-3′)
(SEQ ID NO: 574)
mC*mC*mU*UGAUACCAACCUGCCCAGUUUUAGAGCUAGAAAUAG
CAAGUUAAAAUAAGGCUAGUCCGUUAUCAACUUGAAAAAGUGGCA
CCGAGUCGGUGCmU*mU*mU*U

[0552] 150 nM of prime editor encoding mRNA, 20 μM pegRNA, and 10 μM ngRNA were used for each CD34+ cell electroporation. Prime editing efficiency and indel frequency was examined at 24 hours, 48 hours, and 96 hours after electroporation, respectively. Genomic DNA was extracted at each of the three time points and analyzed with Illumina MiSeq Next Generation Sequencing as described. The prime editing efficiency and indel frequency are summarized in Table 10. Up to 41% prime editing in CD34+ cells was observed at 96 hours post electroporation.

TABLE 10
prime editing efficiency (%) of linker-optimized prime editors (n = 1):

| | 24 h | | 48 h | | 96 h | |
|---|---|---|---|---|---|---|
| linker | editing | indel | editing | indel | editing | indel |
| SEQ ID | efficiency (%) | frequency (%) | efficiency (%) | frequency (%) | efficiency (%) | frequency (%) |
| 289 | 12.9 | 1.4 | 21.9 | 3.9 | 21.2 | 3.9 |
| 291 | 10.4 | 1.4 | 17.9 | 2.3 | 24.2 | 3.7 |
| 293 | 14 | 1.3 | 21.5 | 3.6 | 28.6 | 4.3 |
| 294 | 11 | 1.7 | 22.8 | 3.2 | 31.2 | 5.5 |
| 295 | 13.2 | 1.1 | 23.4 | 2.8 | 31.6 | 5.1 |
| 301 | 14.6 | 1.8 | 19.3 | 2.9 | 39.3 | 6.8 |
| 302 | 15.8 | 2.9 | 27.1 | 4.2 | 37.1 | 7 |
| 303 | 14.7 | 2.4 | 23.2 | 3 | 34.7 | 5.8 |
| 306 | 15.2 | 2.1 | 25 | 4 | 41.3 | 6.9 |
| 309 | 16.2 | 2.3 | 27.5 | 4 | 41.3 | 6.3 |
| 310 | 13.1 | 2.1 | 26.1 | 3.9 | 40.6 | 7.4 |
| 311 | 16.7 | 2.2 | 30.4 | 4.9 | 38.7 | 6.6 |
| | 0.1 | 0.1 | 0.1 | 0.1 | 0.1 | 0.2 |

### Example 3. Prime Editing with Optimized pegRNAs

[0553] Chemically synthesized pegRNAs that lack 3′ terminal Uracils were tested for editing efficiency in CD34+ cells, compared to chemically synthesized pegRNAs having 4 additional uracil nucleotides (5′-“UUUU”-3′) at the 3′ end. A pegRNA and an ngRNA were designed to target the HBB locus. The same pegRNA used in Example 2 were compared with a pegRNA generated by removing the 4 uracil nucleotides at the 3′ end of the pegRNA. The ngRNA used in Example 2 above was paired with the pegRNAs with and without the four 3′ uracil, respectively, to examine prime editing efficiency. The pegRNAs and the ngRNA were synthesized and chemically modified to protect the 5′ and 3′ ends, as shown below:

pegRNA sequence with terminal U:
(SEQ ID NO: 579)
5′-mC*mA*mU*GGUGCACCUGACUCCUGGUUUUAGAGCUAGAAAUAG
CAAGUUAAAAUAAGGCUAGUCCGUUAUCAACUUGAAAAAGUGGCA
CCGAGUCGGUGCAGACUUCUCUACAGGAGUCAGGUGCACmU*mU*
mU*U-3′
pegRNA sequence without terminal U:
(SEQ ID NO: 587)
5′-mC*mA*mU*GGUGCACCUGACUCCUGGUUUUAGAGCUAGAAAUAG
CAAGUUAAAAUAAGGCUAGUCCGUUAUCAACUUGAAAAAGUGGCA
CCGAGUCGGUGCAGACUUCUCUACAGGAGUCAGGUmG*mC*mA*C-3′
nick guide RNA sequence:
(SEQ ID NO: 574)
5′-mC*mC*mU*UGAUACCAACCUGCCCAGUUUUAGAGCUAGAAAUAG
CAAGUUAAAAUAAGGCUAGUCCGUUAUCAACUUGAAAAAGUGGCA
CCGAGUCGGUGCmU*mU*mU*U-3′

[0554] Two mRNAs encoding two different prime editors were used: 1) the PE-C3 codon optimized mRNA (SEQ ID NO: 233) as described in Example 1, and 2) the mRNA encoding a prime editor fusion protein with a (SGGS)8 linker (SEQ ID NO: 894) having the structure (SV43BPNLS-Cas9H84A-(SGGS)8-MMLVRT5MC3-SGGS-SV40BPNLS1) (SEQ ID NO: 80), with the MMLVRT5M portion codon optimized the same as in PE-C3 as described in Example 2. Different amounts of mRNA were also tested. The PE protein encoding mRNA, the pegRNA, and the ngRNA were electroporated in human healthy donor CD34+ cells. For each electroporation, 20 μM pegRNA and 11 μg MngRNA were used. Prime editing efficiency and indel frequency were examined at 48 hours and 96 hours after electroporation, respectively. Genomic DNA was extracted at each time point, and prime editing efficiency and indel frequency were analyzed with Illumnina Miseq Next Generation Sequencing. The editing conditions used, and prime editing efficiencies and indel frequencies are summarized in are summarized in Table 11.

TABLE 11
prime editing efficiency (%) of optimized pegRNAs

| | | | 48 h | | 96 h | |
|---|---|---|---|---|---|---|
| | | | Editing | Indel | Editing | Indel |
| | mRNA | | efficiency | frequency | efficiency | frequency |
| PE mRNA | amount | pegRNA | (%) | (%) | (%) | (%) |
| PE-C3 (SEQ ID | 250 uM | pegRNA plus | 28.75 | 5.2 | 30.59 | 5.2 |
| NO: 233) | | terminal | | | | |
| | | UUUU | | | | |
| PE-C3 (SEQ ID | 250 uM | pegRNA | 30.14 | 6.6 | 32.89 | 6.8 |
| NO: 233) | | without | | | | |
| | | terminal | | | | |
| | | UUUU | | | | |
| PE with | 150 uM | pegRNA plus | 29.01 | 6.1 | 36.66 | 6.7 |
| (SGGS)8 linker | | terminal | | | | |
| (SEQ ID NO: 80) | | UUUU | | | | |
| PE with (SGGS)8 | 150 uM | pegRNA | 27.22 | 5.5 | 29.86 | 6.3 |
| linker (SEQ ID | | without | | | | |
| NO: 80) | | terminal | | | | |
| | | UUUU | | | | |
| PE-C3 (SEQ ID | 150 uM | pegRNA | 19.36 | 4.2 | 23.22 | 4.3 |
| NO: 233) | | without | | | | |
| | | terminal | | | | |
| | | UUUU | | | | |
| PE-C3 (SEQ ID | 150 uM | pegRNA plus | 20.42 | 3.4 | 24.63 | 3.2 |
| NO: 233) | | terminal | | | | |
| | | UUUU | | | | |

### Example 4. Prime Editors with an Engineered Reverse Transcriptase Domain

[0555] Prime editor fusion proteins having an engineered reverse transcriptase domain, including truncations and mutations in the MMLVRT RNaseH domain, were examined for prime editing efficiency. Eleven prime editor fusion proteins were designed, modifications to the RT domain protein structure sequences are shown Table 12 below.

[0556] A pegRNA and an ngRNA were designed to target the sickle cell mutation in the HBB gene locus. Two different prime editing targeting strategies were used: i) incorporation of the sickle cell mutation; and ii) incorporation of a silent PAM mutation in addition to the sickle cell mutation. The DNA sequences encoding the pegRNA and ngRNA sequences are shown as below (a 5′Guanine and a 3′ sequence TTTTTTT (SEQ ID NO: 646) in the DNA sequences encoding the pegRNAs and ngRNA related to transcription and are not involved in HBB targeting):

DNA sequence encoding for pegRNA sequence:
(SEQ ID NO: 588)
GCATGGTGCACCTGACTCCTGGTTTTAGAGCTAGAAATAGCAAGT
TAAAATAAGGCTAGTCCGTTATCAACTTGAAAAAGTGGGACCGAG
TCGGTGCAGACTTCTCCACAGGAGTCAGGTGCACTTTTTTT
DNA sequence encoding for pegRNA sequence
(with silent PAM mutation)
(SEQ ID NO: 589)
GCATGGTGCACCTGACTCCTGGTTTTAGAGCTAGAAATAGCAAGT
TAAAATAAGGCTAGTCCGTTATCAACTTGAAAAAGTGGGACCGAG
TCGGTGCAGACTTCTCTACAGGAGTCAGGTGCACTTTTTTT
DNA sequence encoding for nickRNA sequence
(with silent PAM mutation and ngRNA binding):
(SEQ ID NO: 590)
GCCTTGATACCAACCTGCCCAGTTTTAGAGCTAGAAATAGCAAGT
TAAAATAAGGCTAGTCCGTTATCAACTTGAAAAAGTGGGACCGAG
TCGGTGCTTTTTTT

[0557] The prime editor coding sequences were each constructed in an expression plasmid under the control of a cytomegalovirus (CMV) promoter. The 5′UTR, and the “TAA” stop codon followed by 3′ UTR as provided in Table 68 were also appended to the prime editor encoding sequence in the plasmids. The PEgRNA sequence and the ngRNA sequence were each constructed in a plasmid under the control of a hU6 promoter. The plasmids encoding the prime editors were each individually lipofected along with two additional plasmids, each encoding for the PEgRNA and the ngRNA, into wild type HEK293T cells. 750 ng of the prime editor-encoding plasmid, 25 ng of the PEgRNA-encoding plasmid, and 83 ng of the ngRNA-encoding plasmid were used for lipofection per well (Lipofectamine 2000, Thermo Fisher). A plasmid encoding SpCas9 nuclease, and a plasmid encoding prime editor having full length MMLVRT5M having the sequence of SEQ ID NO: 25 were used as two controls. Genomic DNA was harvested three days post lipofection, PCR amplified and sequenced using Illumina MiseqNext Generation Sequencing. For each treatment, two technical replicates were examined. The results are summarized in Table 12 below. The MMLV-RT pentamutant (SEQ ID NO: 5) were further modified to generate constructs listed in Table 12. Amino acid substitutions are shown as “Original amino acid POSITION substituted amino acid”. For example, D524N refers to an Asp to Asn substitution at position 524 compared to SEQ ID No 1, 5 or 623. The letter X and the number that precedes X indicate the position of truncation. For example, G504X refers to truncation after amino acid Gly504 compared to SEQ ID No 5; Gly504 is retained in the truncated amino acid sequence. 22aa_del_N-terimnus refers to a 22 amino acid deletion at the N terminus of SEQ ID No 5. The corresponding Cas9-RT fusion protein sequences and the RT variant sequences, as well as the polypeptide sequences encoding the same used in the experiment for variants G504X, D524N, and L478X are also provided in Tables 18-20, respectively. It should be noted that in this Example and following Examples 4 described herein, modifications to the MMLVRT are relative to MMLVRT5M, and mutations in MMLVRT5M, unless truncated, are retained in the MMLVRT variants.

[0558] The results are summarized in Table 12 below. Truncation of the prime editor to remove the RNAseH domain after positions G504 or L478 lead to an increase in activity as compared with the original full length construct, and inclusion of the L435K mutation is also well-tolerated.

TABLE 12
Prime editing efficiency using prime
editors having engineered RT domains

| | protein | Editing efficiency, | | Editing | |
|---|---|---|---|---|---|
| MMLVRT | SEQ | no PAM | | efficiency, PAM | |
| modification in PE | ID | mutation (%) | | mutation (%) | |
| SpCas9 | 2 | 0.11 | 0.07 | 0.22 | 0.09 |
| Control prime editor | 25 | 15.3 | 14.58 | 31.57 | 24.35 |
| G504X | 34 | 18.76 | 18.8 | 31.81 | 27.9 |
| D524N | 43 | 16.18 | 14 | 26.67 | 21.02 |
| L478X | 52 | 18.06 | 14.83 | 28.76 | 22.28 |
| L435K, G504X | 61 | 20.49 | 16.76 | 30.97 | 22.8 |
| M428X | 70 | 3.66 | 2.93 | 5.39 | 4.52 |
| Y133R, Y271R, P365X | 71 | 0.04 | 0.02 | 0.09 | 0.08 |
| P365X | 72 | 0.04 | 0.04 | 0.07 | 0.07 |
| K378X | 73 | 0.07 | 0.04 | 0.08 | 0.05 |
| T328X | 74 | 0.04 | 0.03 | 0.07 | 0.03 |
| R278X | 75 | 0.41 | 0.37 | 0.51 | 0.69 |
| 22 aa_del_N-terminus, | 76 | 0.06 | 0.1 | 0.1 | 0.05 |
| L435K, G504X | | | | | |

[0559] The experiment was repeated in HEK293T cells, with a different pair of pegRNA and ngRNA made by replacing the 84th nucleotide Guanine in SEQ ID Nos. 589 and 590 to be consistent with the canonical SpCas9 guide RNA scaffold. Three technical replicates were examined for each prime editor variant. The results are shown in FIG. 5.

[0560] Prime editors that comprise a M-MLV RT with truncation after position G504 in combination with multiple linker and NLS sequences were further tested for editing efficiency in CD34+ cells, in comparison to prime editors having the full length M-MLV RT of SEQ ID No 5. Components and structure of each of the fusion protein are indicated in the first column of Table 13. The amino acid sequences and corresponding DNA/RNA sequences that encode fusion protein are provided in Tables 15, 16, 17, 23, 24, 28, and 53. For Table 53, the NLS sequences are provided in Table 2. In the polynucleotide sequences encoding each of the prime editor fusion proteins, the portion that encodes the reverse transcriptase was codon optimized as the corresponding sequence (or portion thereof) encoding the MMLVRT5M in PE-C3 (DNA and RNA sequence of the full-length codon-optimized MMLVRT5M as set forth in SEQ ID Nos 83 and 84). mRNA encoding each of the prime editor fusion proteins were in vitro transcribed. For in vitro transcription, a 5′UTR was added to the 5′ end and a “TAA” stop codon followed by a 3′UTR (sequence provided in Table 68 was added to the 3′ end of each of the mRNAs. A pegRNA and a ngRNA were synthesized, end protected PEgRNA and ngRNAs as follows were used to introduce the sickle cell mutation into the HBB gene

(SEQ ID NO: 591)
mC*mA*mU*GGUGCACCUGACUCCUGGUUUUAGAGCUAGAAAUAG
CAAGUUAAAAUAAGGCUAGUCCGUUAUCAACUUGAAAAAGUGGCA
CCGAGUCGGUGCAGACUUCUCUACAGGAGUCAGGUGCACmU*mU*
mU*U

nickRNA Sequence:

(SEQ ID NO: 574)
mC*mC*mU*UGAUACCAACCUGCCCAGUUUUAGAGCUAGAAAUAG
CAAGUUAAAAUAAGGCUAGUCCGUUAUCAACUUGAAAAAGUGGCA
CCGAGUCGGUGCmU*mU*mU*U

[0561] 150 nM mRNA, 20 μM PEgRNA, and 10 μM ngRNA were used for electroporation in human healthy donor CD34+ cells. Genomic DNA was harvest 24 hours, 48 hours, 72 hours, and 96 hours after electroporation, respectively, and analyzed with Miseq-based sequencing methods. Editing efficiency and indel frequency are summarized in Table 13 below.

TABLE 13
prime editing efficiency (%) using prime editors having engineered RT domains

| | | 24 h | | 48 h | | 72 h | | 96 h | |
|---|---|---|---|---|---|---|---|---|---|
| | Corre- | Edit- | | Edit- | | Edit- | | Edit- | |
| | spond- | ing | Indel | ing | Indel | ing | Indel | ing | Indel |
| | ing | effi- | fre- | effi- | fre- | effi- | fre- | effi- | fre- |
| | quence | cien- | quen- | cien- | quen- | cien- | quen- | cien- | quen- |
| | Table | cy | cy | cy | cy | cy | cy | cy | cy |
| PE protein structure | No. | (%) | (%) | (%) | (%) | (%) | (%) | (%) | (%) |
| SV40BPNLS-Cas9H840A- | 15 | 13.94 | 2.73 | 15.62 | 3.71 | 17.83 | 4.15 | 18.5 | 4.57 |
| (SGGS)2-XTEN-(SGGS)2- | | | | | | | | | |
| S-MMLVRT5M-SGGS- | | | | | | | | | |
| SV40BPNLS1 | | | | | | | | | |
| SV40BPNLS-Cas9H840A- | 16 | 19.91 | 4.05 | 27.52 | 7.08 | 31.15 | 7.85 | 24.33 | 5.55 |
| (SGGS)8-MMLVRT_{5M}- | | | | | | | | | |
| SGGS-SV40BPNLS1 | | | | | | | | | |
| cmycNLS-BPNLS- | 23 | 22.11 | 4.72 | 21.03 | 5.47 | 28.88 | 7.12 | 30.76 | 8.97 |
| Cas9H840A-(SGGS)8- | | | | | | | | | |
| MMLVRT_{5M}-BPNLS-NLS | | | | | | | | | |
| SV40BPNLS-Cas9H840A- | 28 | 20.24 | 4.89 | 27.68 | 7.38 | 36.64 | 9.67 | 38.98 | 11.07 |
| SGGS-(EAAAK)₈-SGGS- | | | | | | | | | |
| MMLVRT_{5M}-SGGS- | | | | | | | | | |
| SV40BPNLS1 | | | | | | | | | |
| SV40BPNLS-Cas9H840A- | 53 | 17.52 | 2.93 | 21.06 | 4.43 | 26.1 | 5.36 | 26.12 | 5.4 |
| (SGGS)₂-XTEN-(SGGS)₂- | | | | | | | | | |
| MMLVRT_{5M}(G504X)-NLS | | | | | | | | | |
| cmycNLS-BPNLS- | 24 | 26.5 | 5.17 | 31.55 | 8.07 | 34.68 | 8.26 | 37.15 | 9.82 |
| Cas9H840A-(SGGS)8- | | | | | | | | | |
| MMLVRT_{5M}(G504X)- | | | | | | | | | |
| BPNLS-NLS | | | | | | | | | |
| SV40BPNLS-Cas9H840A- | 17 | 26.51 | 5.34 | 34.57 | 8.63 | 37.37 | 8.29 | 40.05 | 10.52 |
| (SGGS)8-MMLVRT_{5M} | | | | | | | | | |
| (G504X)-SGGS-BPNLS1 | | | | | | | | | |
| No treatment negative | — | 0.05 | 0.2 | 0.18 | 0.2 | 0.16 | 0.23 | 0.31 | 0.19 |
| control | | | | | | | | | |

[0562] A mRNA dose response was further performed, using the PE-C3 mRNA and the mRNA encoding prime editor fusion proteins (SV40BPNLS-Cas9H840A-(SGGS)2-XTEN-(SGGS)2-MMLVRT(G504X)-NLS) in Table 13 above, which contains codon-optimized truncated MMLVRT(G504X) having the sequence of SEQ ID NO: 92. At 200 nM mRNA, the full-length and truncated editor behaved similarly (means of 35.7% and 36.6% prime editing, 72h post-electroporation), but the truncated prime editor was slightly more efficient at 150 nM mRNA than the full-length editor (mean of 28.7% for full-length and 34.3% for truncated prime editor).

LENGTHY TABLES
The patent application contains a lengthy table section. A copy of the table is available in electronic form from the USPTO web site (https://seqdata.uspto.gov/?pageRequest=docDetail&DocID=US20240228988A1). An electronic copy of the table will also be available from the USPTO upon request and payment of the fee set forth in 37 CFR 1.19(b)(3).

1. A prime editing composition that comprises a fusion protein or a polynucleotide encoding the fusion protein, wherein the fusion protein comprises a DNA binding domain and a DNA polymerase domain connected via a peptide linker, wherein the peptide linker comprises an amino acid sequence with at least 80% identity to a sequence selected from the group consisting of SEQ ID Nos. 289, 291, 293, 294, 295, 301, 302, 303, 306, 309, 310, and 311.

2. A prime editing composition that comprises a fusion protein or a polynucleotide encoding the fusion protein, wherein the fusion protein comprises a DNA binding domain and a DNA polymerase domain connected via a peptide linker, wherein the peptide linker comprises an amino acid sequence with at least 80% identity to a sequence selected from the group consisting of SEQ ID Nos. 286-411.

3. The prime editing composition of claim 1, wherein the amino acid sequence of the peptide linker has at least about 81%, 82%, 83%, 84%, 85%, 86%, 87%, 88%, 80%, 90%, 91%, 92%, 93%, 94%, 95%, 96%, 97%, 98%, 99%, or 100% sequence identity to the selected sequence.

4. The prime editing composition of claim 1, wherein the selected sequence is SEQ ID NO: 302.

5. The prime editing composition of claim 1, wherein the selected sequence is SEQ ID NO: 309.

6. A prime editing composition that comprises a fusion protein or a polynucleotide encoding the fusion protein, wherein the fusion protein comprises a DNA binding domain and a DNA polymerase domain connected via a peptide linker, wherein the peptide linker comprises at least 4 contiguous SGGS motifs (SEQ ID NO: 305).

7.-11. (canceled)

12. The prime editing composition of claim 1, wherein the DNA polymerase domain comprises a reverse transcriptase (RT) domain.

13. The prime editing composition of claim 12, wherein the RT domain is a Moloney murine leukemia virus (M-MLV) RT domain.

14. The prime editing composition of claim 13, wherein the M-MLV RT domain comprises an amino acid having at least about 80%, 81%, 82%, 83%, 84%, 85%, 86%, 87%, 88%, 89%, 90%, 91%, 92%, 93%, 94%, 95%, 96%, 97%, 98%, 99%, or 100% sequence identity to SEQ ID NO: 5.

15. The prime editing composition of claim 13, wherein the M-MLV RT domain comprises an amino acid sequence that is truncated at C terminus between positions corresponding to amino acids 504 and 505 as set forth in SEQ ID NO: 1.

16. The prime editing composition of claim 15, wherein the M-MLV RT domain comprises an amino acid sequence having at least about 80%, 81%, 82%, 83%, 84%, 85%, 86%, 87%, 88%, 89%, 90%, 91%, 92%, 93%, 94%, 95%, 96%, 97%, 98%, 99%, or 100% sequence identity to SEQ ID NO: 36.

17. The prime editing composition of claim 13, wherein the M-MLV RT domain comprises an amino acid sequence that is truncated at C terminus between positions corresponding to amino acids 478 and 479 as set forth in SEQ ID NO: 1.

18. The prime editing composition of claim 17, wherein the M-MLV RT domain comprises an amino acid sequence having at least about 80%, 81%, 82%, 83%, 84%, 85%, 86%, 87%, 88%, 89%, 90%, 91%, 92%, 93%, 94%, 95%, 96%, 97%, 98%, 99%, or 100% sequence identity to SEQ ID NO: 54.

19.-24. (canceled)

25. The prime editing composition of claim 1, wherein the DNA binding domain comprises a CRISPR associated (Cas) protein.

26. The prime editing composition of claim 25, wherein the Cas protein is a Type II Cas protein.

27. The prime editing composition of claim 26, wherein the Cas protein is Cas9.

28. The prime editing composition of claim 27, wherein the Cas9 protein is a nickase that comprises a mutation in a HNH domain.

29. The prime editing composition of claim 28, wherein the Cas9 protein comprises a H840A mutation compared to SEQ ID NO: 2.

30. The prime editing composition of claim 29, wherein the DNA binding domain comprises an amino acid sequence having at least about 80%, 81%, 82%, 83%, 84%, 85%, 86%, 87%, 88%, 89%, 90%, 91%, 92%, 93%, 94%, 95%, 96%, 97%, 98%, 99%, or 100% sequence identity to SEQ ID NO: 7.

31. The prime editing composition of claim 25, wherein the Cas protein is a Type V Cas protein.

32.-120. (canceled)

The application's sequence listing, which the Patent Office published only in electronic form, follows.

SEQUENCE LISTING (894 sequences)

SEQ ID NO: 1 - protein, 677 aa, synthetic construct
  REGION 1..677: note = Description of Artificial Sequence: Synthetic polypeptide
TLNIEDEYRLHETSKEPDVSLGSTWLSDFPQAWAETGGMGLAVRQAPLIIPLKATSTPVSIKQYPMSQEARLGIKPHIQRLLDQGILVPCQSPWNTPLLPVKKPGTNDYRPVQDLREVNKRVEDIHPTVPNPYNLLSGLPPSHQWYTVLDLKDAFFCLRLHPTSQPLFAFEWRDPEMGISGQLTWTRLPQGFKNSPTLFDEALHRDLADFRIQHPDLILLQYVDDLLLAATSELDCQQGTRALLQTLGNLGYRASAKKAQICQKQVKYLGYLLKEGQRWLTEARKETVMGQPTPKTPRQLREFLGTAGFCRLWIPGFAEMAAPLYPLTKTGTLFNWGPDQQKAYQEIKQALLTAPALGLPDLTKPFELFVDEKQGYAKGVLTQKLGPWRRPVAYLSKKLDPVAAGWPPCLRMVAAIAVLTKDAGKLTMGQPLVILAPHAVEALVKQPPDRWLSNARMTHYQALLLDTDRVQFGPVVALNPATLLPLPEEGLQHNCLDILAEAHGTRPDLTDQPLPDADHTWYTDGSSLLQEGQRKAGAAVTTETEVIWAKALPAGTSAQRAELIALTQALKMAEGKKLNVYTDSRYAFATAHIHGEIYRRRGLLTSEGKEIKNKDEILALLKALFLPKRLSIIHCPGHQKGHSAEARGNRMADQAARKAAITETPDTSTLLIENSSP

SEQ ID NO: 2 - protein, 1368 aa, synthetic construct [sequence omitted]

SEQ ID NO: 3 - protein, 1052 aa, synthetic construct
  REGION 1..1052: note = Description of Artificial Sequence: Synthetic polypeptide
MKRNYILGLDIGITSVGYGIIDYETRDVIDAGVRLFKEANVENNEGRRSKRGARRLKRRRRHRIQRVKKLLFDYNLLTDHSELSGINPYEARVKGLSQKLSEEEFSAALLHLAKRRGVHNVNEVEEDTGNELSTKEQISRNSKALEEKYVAELQLERLKKDGEVRGSINRFKTSDYVKEAKQLLKVQKAYHQLDQSFIDTYIDLLETRRTYYEGPGEGSPFGWKDIKEWYEMLMGHCTYFPEELRSVKYAYNADLYNALNDLNNLVITRDENEKLEYYEKFQIIENVFKQKKKPTLKQIAKEILVNEEDIKGYRVTSTGKPEFTNLKVYHDIKDITARKEIIENAELLDQIAKILTIYQSSEDIQEELTNLNSELTQEEIEQISNLKGYTGTHNLSLKAINLILDELWHTNDNQIAIFNRLKLVPKKVDLSQQKEIPTTLVDDFILSPVVKRSFIQSIKVINAIIKKYGLPNDIIIELAREKNSKDAQKMINEMQKRNRQTNERIEEIIRTTGKENAKYLIEKIKLHDMQEGKCLYSLEAIPLEDLLNNPFNYEVDHIIPRSVSFDNSFNNKVLVKQEEASKKGNRTPFQYLSSSDSKISYETFKKHILNLAKGKGRISKTKKEYLLEERDINRFSVQKDFINRNLVDTRYATRGLMNLLRSYFRVNNLDVKVKSINGGFTSFLRRKWKFKKERNKGYKHHAEDALIIANADFIFKEWKKLDKAKKVMENQMFEEKQAESMPEIETEQEYKEIFITPHQIKHIKDFKDYKYSHRVDKKPNRELINDTLYSTRKDDKGNTLIVNNLNGLYDKDNDKLKKLINKSPEKLLMYHHDPQTYQKLKLIMEQYGDEKNPLYKYYEETGNYLTKYSKKDNGPVIKKIKYYGNKLNAHLDITDDYPNSRNKVVKLSLKPYRFDVYLDNGVYKFVTVKNLDVIKKENYYEVNSKCYEEAKKLKKISNQAEFIASFYNNDLIKINGELYRVIGVNNDLLNRIEVNMIDITYREYLENMNDKRPPRIIKTIASKTQSIKKYSTDILGNLYEVKSKKHPQIIKK

SEQ ID NO: 4 - protein, 678 aa, synthetic construct
  REGION 1..678: note = Description of Artificial Sequence: Synthetic polypeptide
MTLNIEDEYRLHETSKEPDVSLGSTWLSDFPQAWAETGGMGLAVRQAPLIIPLKATSTPVSIKQYPMSQEARLGIKPHIQRLLDQGILVPCQSPWNTPLLPVKKPGTNDYRPVQDLREVNKRVEDIHPTVPNPYNLLSGLPPSHQWYTVLDLKDAFFCLRLHPTSQPLFAFEWRDPEMGISGQLTWTRLPQGFKNSPTLFNEALHRDLADFRIQHPDLILLQYVDDLLLAATSELDCQQGTRALLQTLGNLGYRASAKKAQICQKQVKYLGYLLKEGQRWLTEARKETVMGQPTPKTPRQLREFLGKAGFCRLFIPGFAEMAAPLYPLTKPGTLFNWGPDQQKAYQEIKQALLTAPALGLPDLTKPFELFVDEKQGYAKGVLTQKLGPWRRPVAYLSKKLDPVAAGWPPCLRMVAAIAVLTKDAGKLTMGQPLVILAPHAVEALVKQPPDRWLSNARMTHYQALLLDTDRVQFGPVVALNPATLLPLPEEGLQHNCLDILAEAHGTRPDLTDQPLPDADHTWYTDGSSLLQEGQRKAGAAVTTETEVIWAKALPAGTSAQRAELIALTQALKMAEGKKLNVYTDSRYAFATAHIHGEIYRRRGWLTSEGKEIKNKDEILALLKALFLPKRLSIIHCPGHQKGHSAEARGNRMADQAARKAAITETPDTSTLLIENSSP

SEQ ID NO: 5 - protein, 677 aa, synthetic construct
  REGION 1..677: note = Description of Artificial Sequence: Synthetic polypeptide
TLNIEDEYRLHETSKEPDVSLGSTWLSDFPQAWAETGGMGLAVRQAPLIIPLKATSTPVSIKQYPMSQEARLGIKPHIQRLLDQGILVPCQSPWNTPLLPVKKPGTNDYRPVQDLREVNKRVEDIHPTVPNPYNLLSGLPPSHQWYTVLDLKDAFFCLRLHPTSQPLFAFEWRDPEMGISGQLTWTRLPQGFKNSPTLFNEALHRDLADFRIQHPDLILLQYVDDLLLAATSELDCQQGTRALLQTLGNLGYRASAKKAQICQKQVKYLGYLLKEGQRWLTEARKETVMGQPTPKTPRQLREFLGKAGFCRLFIPGFAEMAAPLYPLTKPGTLFNWGPDQQKAYQEIKQALLTAPALGLPDLTKPFELFVDEKQGYAKGVLTQKLGPWRRPVAYLSKKLDPVAAGWPPCLRMVAAIAVLTKDAGKLTMGQPLVILAPHAVEALVKQPPDRWLSNARMTHYQALLLDTDRVQFGPVVALNPATLLPLPEEGLQHNCLDILAEAHGTRPDLTDQPLPDADHTWYTDGSSLLQEGQRKAGAAVTTETEVIWAKALPAGTSAQRAELIALTQALKMAEGKKLNVYTDSRYAFATAHIHGEIYRRRGWLTSEGKEIKNKDEILALLKALFLPKRLSIIHCPGHQKGHSAEARGNRMADQAARKAAITETPDTSTLLIENSSP

SEQ ID NO: 6 - protein, 1368 aa, synthetic construct
  REGION 1..1368: note = Description of Artificial Sequence: Synthetic polypeptide
MDKKYSIGLDIGTNSVGWAVITDEYKVPSKKFKVLGNTDRHSIKKNLIGALLFDSGETAEATRLKRTARRRYTRRKNRICYLQEIFSNEMAKVDDSFFHRLEESFLVEEDKKHERHPIFGNIVDEVAYHEKYPTIYHLRKKLVDSTDKADLRLIYLALAHMIKFRGHFLIEGDLNPDNSDVDKLFIQLVQTYNQLFEENPINASGVDAKAILSARLSKSRRLENLIAQLPGEKKNGLFGNLIALSLGLTPNFKSNFDLAEDAKLQLSKDTYDDDLDNLLAQIGDQYADLFLAAKNLSDAILLSDILRVNTEITKAPLSASMIKRYDEHHQDLTLLKALVRQQLPEKYKEIFFDQSKNGYAGYIDGGASQEEFYKFIKPILEKMDGTEELLVKLNREDLLRKQRTFDNGSIPHQIHLGELHAILRRQEDFYPFLKDNREKIEKILTFRIPYYVGPLARGNSRFAWMTRKSEETITPWNFEEVVDKGASAQSFIERMTNFDKNLPNEKVLPKHSLLYEYFTVYNELTKVKYVTEGMRKPAFLSGEQKKAIVDLLFKTNRKVTVKQLKEDYFKKIECFDSVEISGVEDRFNASLGTYHDLLKIIKDKDFLDNEENEDILEDIVLTLTLFEDREMIEERLKTYAHLFDDKVMKQLKRRRYTGWGRLSRKLINGIRDKQSGKTILDFLKSDGFANRNFMQLIHDDSLTFKEDIQKAQVSGQGDSLHEHIANLAGSPAIKKGILQTVKVVDELVKVMGRHKPENIVIEMARENQTTQKGQKNSRERMKRIEEGIKELGSQILKEHPVENTQLQNEKLYLYYLQNGRDMYVDQELDINRLSDYDVDAIVPQSFLKDDSIDNKVLTRSDKNRGKSDNVPSEEVVKKMKNYWRQLLNAKLITQRKFDNLTKAERGGLSELDKAGFIKRQLVETRQITKHVAQILDSRMNTKYDENDKLIREVKVITLKSKLVSDFRKDFQFYKVREINNYHHAHDAYLNAVVGTALIKKYPKLESEFVYGDYKVYDVRKMIAKSEQEIGKATAKYFFYSNIMNFFKTEITLANGEIRKRPLIETNGETGEIVWDKGRDFATVRKVLSMPQVNIVKKTEVQTGGFSKESILPKRNSDKLIARKKDWDPKKYGGFDSPTVAYSVLVVAKVEKGKSKKLKSVKELLGITIMERSSFEKNPIDFLEAKGYKEVKKDLIIKLPKYSLFELENGRKRMLASAGELQKGNELALPSKYVNFLYLASHYEKLKGSPEDNEQKQLFVEQHKHYLDEIIEQISEFSKRVILADANLDKVLSAYNKHRDKPIREQAENIIHLFTLTNLGAPAAFKYFDTTIDRKRYTSTKEVLDATLIHQSITGLYETRIDLSQLGGD

SEQ ID NO: 7 - protein, 1367 aa, synthetic construct
  REGION 1..1367: note = Description of Artificial Sequence: Synthetic polypeptide
DKKYSIGLDIGTNSVGWAVITDEYKVPSKKFKVLGNTDRHSIKKNLIGALLFDSGETAEATRLKRTARRRYTRRKNRICYLQEIFSNEMAKVDDSFFHRLEESFLVEEDKKHERHPIFGNIVDEVAYHEKYPTIYHLRKKLVDSTDKADLRLIYLALAHMIKFRGHFLIEGDLNPDNSDVDKLFIQLVQTYNQLFEENPINASGVDAKAILSARLSKSRRLENLIAQLPGEKKNGLFGNLIALSLGLTPNFKSNFDLAEDAKLQLSKDTYDDDLDNLLAQIGDQYADLFLAAKNLSDAILLSDILRVNTEITKAPLSASMIKRYDEHHQDLTLLKALVRQQLPEKYKEIFFDQSKNGYAGYIDGGASQEEFYKFIKPILEKMDGTEELLVKLNREDLLRKQRTFDNGSIPHQIHLGELHAILRRQEDFYPFLKDNREKIEKILTFRIPYYVGPLARGNSRFAWMTRKSEETITPWNFEEVVDKGASAQSFIERMTNFDKNLPNEKVLPKHSLLYEYFTVYNELTKVKYVTEGMRKPAFLSGEQKKAIVDLLFKTNRKVTVKQLKEDYFKKIECFDSVEISGVEDRFNASLGTYHDLLKIIKDKDFLDNEENEDILEDIVLTLTLFEDREMIEERLKTYAHLFDDKVMKQLKRRRYTGWGRLSRKLINGIRDKQSGKTILDFLKSDGFANRNFMQLIHDDSLTFKEDIQKAQVSGQGDSLHEHIANLAGSPAIKKGILQTVKVVDELVKVMGRHKPENIVIEMARENQTTQKGQKNSRERMKRIEEGIKELGSQILKEHPVENTQLQNEKLYLYYLQNGRDMYVDQELDINRLSDYDVDAIVPQSFLKDDSIDNKVLTRSDKNRGKSDNVPSEEVVKKMKNYWRQLLNAKLITQRKFDNLTKAERGGLSELDKAGFIKRQLVETRQITKHVAQILDSRMNTKYDENDKLIREVKVITLKSKLVSDFRKDFQFYKVREINNYHHAHDAYLNAVVGTALIKKYPKLESEFVYGDYKVYDVRKMIAKSEQEIGKATAKYFFYSNIMNFFKTEITLANGEIRKRPLIETNGETGEIVWDKGRDFATVRKVLSMPQVNIVKKTEVQTGGFSKESILPKRNSDKLIARKKDWDPKKYGGFDSPTVAYSVLVVAKVEKGKSKKLKSVKELLGITIMERSSFEKNPIDFLEAKGYKEVKKDLIIKLPKYSLFELENGRKRMLASAGELQKGNELALPSKYVNFLYLASHYEKLKGSPEDNEQKQLFVEQHKHYLDEIIEQISEFSKRVILADANLDKVLSAYNKHRDKPIREQAENIIHLFTLTNLGAPAAFKYFDTTIDRKRYTSTKEVLDATLIHQSITGLYETRIDLSQLGGD

SEQ ID NO: 8 - protein, 18 aa, synthetic construct
  REGION 1..18: note = Description of Artificial Sequence: Synthetic peptide
KRTADGSEFESPKKKRKV

SEQ ID NO: 9 - protein, 19 aa, synthetic construct
  REGION 1..19: note = Description of Artificial Sequence: Synthetic peptide
MKRTADGSEFESPKKKRKV

SEQ ID NO: 10 - protein, 29 aa, synthetic construct
  REGION 1..29: note = Description of Artificial Sequence: Synthetic peptide
PAAKRVKLDGGKRTADGSEFESPKKKRKV

SEQ ID NO: 11 - protein, 17 aa, synthetic construct
  REGION 1..17: note = Description of Artificial Sequence: Synthetic peptide
KRTADGSEFEPKKKRKV

SEQ ID NO: 12 - protein, 7 aa, synthetic construct
  REGION 1..7: note = Description of Artificial Sequence: Synthetic peptide
PKKKRKV

SEQ ID NO: 13 - protein, 29 aa, synthetic construct
  REGION 1..29: note = Description of Artificial Sequence: Synthetic peptide
KRTADSQHSTPPKTKRKVEFESPKKKRKV

SEQ ID NO: 14 - protein, 28 aa, synthetic construct
  REGION 1..28: note = Description of Artificial Sequence: Synthetic peptide
KRTADSQHSTPPKTKRKVEFEPKKKRKV

SEQ ID NO: 15 - protein, 19 aa, synthetic construct
  REGION 1..19: note = Description of Artificial Sequence: Synthetic peptide
MKRTADGSEFESPKKKRKV

SEQ ID NO: 16 - protein, 30 aa, synthetic construct
  REGION 1..30: note = Description of Artificial Sequence: Synthetic polypeptide
MDSLLMNRRKFLYQFKNVRWAKGRRETYLC

SEQ ID NO: 17 - protein, 20 aa, synthetic construct
  REGION 1..20: note = Description of Artificial Sequence: Synthetic peptide
AVKRPAATKKAGQAKKKKLD

SEQ ID NO: 18 - protein, 25 aa, synthetic construct
  REGION 1..25: note = Description of Artificial Sequence: Synthetic peptide
MSRRRKANPTKLSENAKKLAKEVEN

SEQ ID NO: 19 - protein, 9 aa, synthetic construct
  REGION 1..9: note = Description of Artificial Sequence: Synthetic peptide
PAAKRVKLD

SEQ ID NO: 20 - protein, 9 aa, synthetic construct
  REGION 1..9: note = Description of Artificial Sequence: Synthetic peptide
KLKIKRPVK

SEQ ID NO: 21 - protein, 8 aa, synthetic construct
  REGION 1..8: note = Description of Artificial Sequence: Synthetic peptide
VSRKRPRP

SEQ ID NO: 22 - protein, 10 aa, synthetic construct
  REGION 1..10: note = Description of Artificial Sequence: Synthetic peptide
EGAPPAKRAR

SEQ ID NO: 23 - protein, 12 aa, synthetic construct
  REGION 1..12: note = Description of Artificial Sequence: Synthetic peptide
PPQPKKKPLDGE

SEQ ID NO: 24 - protein, 21 aa, synthetic construct
  REGION 1..21: note = Description of Artificial Sequence: Synthetic peptide
SGGSKRTADGSEFEPKKKRKV

SEQ ID NO: 25 - protein, 2117 aa, synthetic construct
  REGION 1..2117: note = Description of Artificial Sequence: Synthetic polypeptide
MKRTADGSEFESPKKKRKVDKKYSIGLDIGTNSVGWAVITDEYKVPSKKFKVLGNTDRHSIKKNLIGALLFDSGETAEATRLKRTARRRYTRRKNRICYLQEIFSNEMAKVDDSFFHRLEESFLVEEDKKHERHPIFGNIVDEVAYHEKYPTIYHLRKKLVDSTDKADLRLIYLALAHMIKFRGHFLIEGDLNPDNSDVDKLFIQLVQTYNQLFEENPINASGVDAKAILSARLSKSRRLENLIAQLPGEKKNGLFGNLIALSLGLTPNFKSNFDLAEDAKLQLSKDTYDDDLDNLLAQIGDQYADLFLAAKNLSDAILLSDILRVNTEITKAPLSASMIKRYDEHHQDLTLLKALVRQQLPEKYKEIFFDQSKNGYAGYIDGGASQEEFYKFIKPILEKMDGTEELLVKLNREDLLRKQRTFDNGSIPHQIHLGELHAILRRQEDFYPFLKDNREKIEKILTFRIPYYVGPLARGNSRFAWMTRKSEETITPWNFEEVVDKGASAQSFIERMTNFDKNLPNEKVLPKHSLLYEYFTVYNELTKVKYVTEGMRKPAFLSGEQKKAIVDLLFKTNRKVTVKQLKEDYFKKIECFDSVEISGVEDRFNASLGTYHDLLKIIKDKDFLDNEENEDILEDIVLTLTLFEDREMIEERLKTYAHLFDDKVMKQLKRRRYTGWGRLSRKLINGIRDKQSGKTILDFLKSDGFANRNFMQLIHDDSLTFKEDIQKAQVSGQGDSLHEHIANLAGSPAIKKGILQTVKVVDELVKVMGRHKPENIVIEMARENQTTQKGQKNSRERMKRIEEGIKELGSQILKEHPVENTQLQNEKLYLYYLQNGRDMYVDQELDINRLSDYDVDAIVPQSFLKDDSIDNKVLTRSDKNRGKSDNVPSEEVVKKMKNYWRQLLNAKLITQRKFDNLTKAERGGLSELDKAGFIKRQLVETRQITKHVAQILDSRMNTKYDENDKLIREVKVITLKSKLVSDFRKDFQFYKVREINNYHHAHDAYLNAVVGTALIKKYPKLESEFVYGDYKVYDVRKMIAKSEQEIGKATAKYFFYSNIMNFFKTEITLANGEIRKRPLIETNGETGEIVWDKGRDFATVRKVLSMPQVNIVKKTEVQTGGFSKESILPKRNSDKLIARKKDWDPKKYGGFDSPTVAYSVLVVAKVEKGKSKKLKSVKELLGITIMERSSFEKNPIDFLEAKGYKEVKKDLIIKLPKYSLFELENGRKRMLASAGELQKGNELALPSKYVNFLYLASHYEKLKGSPEDNEQKQLFVEQHKHYLDEIIEQISEFSKRVILADANLDKVLSAYNKHRDKPIREQAENIIHLFTLTNLGAPAAFKYFDTTIDRKRYTSTKEVLDATLIHQSITGLYETRIDLSQLGGDSGGSSGGSSGSETPGTSESATPESSGGSSGGSSTLNIEDEYRLHETSKEPDVSLGSTWLSDFPQAWAETGGMGLAVRQAPLIIPLKATSTPVSIKQYPMSQEARLGIKPHIQRLLDQGILVPCQSPWNTPLLPVKKPGTNDYRPVQDLREVNKRVEDIHPTVPNPYNLLSGLPPSHQWYTVLDLKDAFFCLRLHPTSQPLFAFEWRDPEMGISGQLTWTRLPQGFKNSPTLFNEALHRDLADFRIQHPDLILLQYVDDLLLAATSELDCQQGTRALLQTLGNLGYRASAKKAQICQKQVKYLGYLLKEGQRWLTEARKETVMGQPTPKTPRQLREFLGKAGFCRLFIPGFAEMAAPLYPLTKPGTLFNWGPDQQKAYQEIKQALLTAPALGLPDLTKPFELFVDEKQGYAKGVLTQKLGPWRRPVAYLSKKLDPVAAGWPPCLRMVAAIAVLTKDAGKLTMGQPLVILAPHAVEALVKQPPDRWLSNARMTHYQALLLDTDRVQFGPVVALNPATLLPLPEEGLQHNCLDILAEAHGTRPDLTDQPLPDADHTWYTDGSSLLQEGQRKAGAAVTTETEVIWAKALPAGTSAQRAELIALTQALKMAEGKKLNVYTDSRYAFATAHIHGEIYRRRGWLTSEGKEIKNKDEILALLKALFLPKRLSIIHCPGHQKGHSAEARGNRMADQAARKAAITETPDTSTLLIENSSPSGGSKRTADGSEFEPKKKRKV

SEQ ID NO: 26 - DNA, 6351 bp, synthetic construct
  misc_feature 1..6351: note = Description of Artificial Sequence: Synthetic polynucleotide
  source 1..6351: mol_type = other DNA
atgaaacgtacagccgacggaagcgagttcgagtcaccaaagaagaagcggaaagtcgacaagaagtacagcatcggcctggacatcggcaccaactctgtgggctgggccgtgatcaccgacgagtacaaggtgcccagcaagaaattcaaggtgctgggcaacaccgaccggcacagcatcaagaagaacctgatcggagccctgctgttcgacagcggcgaaacagccgaggccacccggctgaagagaaccgccagaagaagatacaccagacggaagaaccggatctgctatctgcaagagatcttcagcaacgagatggccaaggtggacgacagcttcttccacagactggaagagtccttcctggtggaagaggataagaagcacgagcggcaccccatcttcggcaacatcgtggacgaggtggcctaccacgagaagtaccccaccatctaccacctgagaaagaaactggtggacagcaccgacaaggccgacctgcggctgatctatctggccctggcccacatgatcaagttccggggccacttcctgatcgagggcgacctgaaccccgacaacagcgacgtggacaagctgttcatccagctggtgcagacctacaaccagctgttcgaggaaaaccccatcaacgccagcggcgtggacgccaaggccatcctgtctgccagactgagcaagagcagacggctggaaaatctgatcgcccagctgcccggcgagaagaagaatggcctgttcggaaacctgattgccctgagcctgggcctgacccccaacttcaagagcaacttcgacctggccgaggatgccaaactgcagctgagcaaggacacctacgacgacgacctggacaacctgctggcccagatcggcgaccagtacgccgacctgtttctggccgccaagaacctgtccgacgccatcctgctgagcgacatcctgagagtgaacaccgagatcaccaaggcccccctgagcgcctctatgatcaagagatacgacgagcaccaccaggacctgaccctgctgaaagctctcgtgcggcagcagctgcctgagaagtacaaagagattttcttcgaccagagcaagaacggctacgccggctacattgacggcggagccagccaggaagagttctacaagttcatcaagcccatcctggaaaagatggacggcaccgaggaactgctcgtgaagctgaacagagaggacctgctgcggaagcagcggaccttcgacaacggcagcatcccccaccagatccacctgggagagctgcacgccattctgcggcggcaggaagatttttacccattcctgaaggacaaccgggaaaagatcgagaagatcctgaccttccgcatcccctactacgtgggccctctggccaggggaaacagcagattcgcctggatgaccagaaagagcgaggaaaccatcaccccctggaacttcgaggaagtggtggacaagggcgcttccgcccagagcttcatcgagcggatgaccaacttcgataagaacctgcccaacgagaaggtgctgcccaagcacagcctgctgtacgagtacttcaccgtgtataacgagctgaccaaagtgaaatacgtgaccgagggaatgagaaagcccgccttcctgagcggcgagcagaaaaaggccatcgtggacctgctgttcaagaccaaccggaaagtgaccgtgaagcagctgaaagaggactacttcaagaaaatcgagtgcttcgactccgtggaaatctccggcgtggaagatcggttcaacgcctccctgggcacataccacgatctgctgaaaattatcaaggacaaggacttcctggacaatgaggaaaacgaggacattctggaagatatcgtgctgaccctgacactgtttgaggacagagagatgatcgaggaacggctgaaaacctatgcccacctgttcgacgacaaagtgatgaagcagctgaagcggcggagatacaccggctggggcaggctgagccggaagctgatcaacggcatccgggacaagcagtccggcaagacaatcctggatttcctgaagtccgacggcttcgccaacagaaacttcatgcagctgatccacgacgacagcctgacctttaaagaggacatccagaaagcccaggtgtccggccagggcgatagcctgcacgagcacattgccaatctggccggcagccccgccattaagaagggcatcctgcagacagtgaaggtggtggacgagctcgtgaaagtgatgggccggcacaagcccgagaacatcgtgatcgaaatggccagagagaaccagaccacccagaagggacagaagaacagccgcgagagaatgaagcggatcgaagagggcatcaaagagctgggcagccagatcctgaaagaacaccccgtggaaaacacccagctgcagaacgagaagctgtacctgtactacctgcagaatgggcgggatatgtacgtggaccaggaactggacatcaaccggctgtccgactacgatgtggacgctatcgtgcctcagagctttctgaaggacgactccatcgacaacaaggtgctgaccagaagcgacaagaaccggggcaagagcgacaacgtgccctccgaagaggtcgtgaagaagatgaagaactactggcggcagctgctgaacgccaagctgattacccagagaaagttcgacaatctgaccaaggccgagagaggcggcctgagcgaactggataaggccggcttcatcaagagacagctggtggaaacccggcagatcacaaagcacgtggcacagatcctggactcccggatgaacactaagtacgacgagaatgacaagctgatccgggaagtgaaagtgatcaccctgaagtccaagctggtgtccgatttccggaaggatttccagttttacaaagtgcgcgagatcaacaactaccaccacgcccacgacgcctacctgaacgccgtcgtgggaaccgccctgatcaaaaagtaccctaagctggaaagcgagttcgtgtacggcgactacaaggtgtacgacgtgcggaagatgatcgccaagagcgagcaggaaatcggcaaggctaccgccaagtacttcttctacagcaacatcatgaactttttcaagaccgagattaccctggccaacggcgagatccggaagcggcctctgatcgagacaaacggcgaaaccggggagatcgtgtgggataagggccgggattttgccaccgtgcggaaagtgctgagcatgccccaagtgaatatcgtgaaaaagaccgaggtgcagacaggcggcttcagcaaagagtctatcctgcccaagaggaacagcgataagctgatcgccagaaagaaggactgggaccctaagaagtacggcggcttcgacagccccaccgtggcctattctgtgctggtggtggccaaagtggaaaagggcaagtccaagaaactgaagagtgtgaaagagctgctggggatcaccatcatggaaagaagcagcttcgagaagaatcccatcgactttctggaagccaagggctacaaagaagtgaaaaaggacctgatcatcaagctgcctaagtactccctgttcgagctggaaaacggccggaagagaatgctggcctctgccggcgaactgcagaagggaaacgaactggccctgccctccaaatatgtgaacttcctgtacctggccagccactatgagaagctgaagggctcccccgaggataatgagcagaaacagctgtttgtggaacagcacaagcactacctggacgagatcatcgagcagatcagcgagttctccaagagagtgatcctggccgacgctaatctggacaaagtgctgtccgcctacaacaagcaccgggataagcccatcagagagcaggccgagaatatcatccacctgtttaccctgaccaatctgggagcccctgccgccttcaagtactttgacaccaccatcgaccggaagaggtacaccagcaccaaagaggtgctggacgccaccctgatccaccagagcatcaccggcctgtacgagacacggatcgacctgtctcagctgggaggtgactctggaggatctagcggaggatcctctggcagcgagacaccaggaacaagcgagtcagcaacaccagagagcagtggcggcagcagcggcggcagcagcaccctaaatatagaagatgagtatcggctacatgagacctcaaaagagccagatgtttctctagggtccacatggctgtctgattttcctcaggcctgggcggaaaccgggggcatgggactggcagttcgccaagctcctctgatcatacctctgaaagcaacctctacccccgtgtccataaaacaataccccatgtcacaagaagccagactggggatcaagccccacatacagagactgttggaccagggaatactggtaccctgccagtccccctggaacacgcccctgctacccgttaagaaaccagggactaatgattataggcctgtccaggatctgagagaagtcaacaagcgggtggaagatatccaccccaccgtgcccaacccttacaacctcttgagcgggctcccaccgtcccaccagtggtacactgtgcttgatttaaaggatgcctttttctgcctgagactccaccccaccagtcagcctctcttcgcctttgagtggagagatccagagatgggaatctcaggacaattgacctggaccagactcccacagggtttcaaaaacagtcccaccctgtttaatgaggcactgcacagagacctagcagacttccggatccagcacccagacttgatcctgctacagtacgtggatgacttactgctggccgccacttctgagctagactgccaacaaggtactcgggccctgttacaaaccctagggaacctcgggtatcgggcctcggccaagaaagcccaaatttgccagaaacaggtcaagtatctggggtatcttctaaaagagggtcagagatggctgactgaggccagaaaagagactgtgatggggcagcctactcctaagacccctcgacaactaagggagttcctagggaaggcaggcttctgtcgcctcttcatccctgggtttgcagaaatggcagcccccctgtaccctctcaccaaaccggggactctgtttaattggggcccagaccaacaaaaggcctatcaagaaatcaagcaagctcttctaactgccccagccctggggttgccagatttgactaagccctttgaactctttgtcgacgagaagcagggctacgccaaaggtgtcctaacgcaaaaactgggaccttggcgtcggccggtggcctacctgtccaaaaagctagacccagtagcagctgggtggcccccttgcctacggatggtagcagccattgccgtactgacaaaggatgcaggcaagctaaccatgggacagccactagtcattctggccccccatgcagtagaggcactagtcaaacaaccccccgaccgctggctttccaacgcccggatgactcactatcaggccttgcttttggacacggaccgggtccagttcggaccggtggtagccctgaacccggctacgctgctcccactgcctgaggaagggctgcaacacaactgccttgatatcctggccgaagcccacggaacccgacccgacctaacggaccagccgctcccagacgccgaccacacctggtacacggatggaagcagtctcttacaagagggacagcgtaaggcgggagctgcggtgaccaccgagaccgaggtaatctgggctaaagccctgccagccgggacatccgctcagcgggctgaactgatagcactcacccaggccctaaagatggcagaaggtaagaagctaaatgtttatactgatagccgttatgcttttgctactgcccatatccatggagaaatatacagaaggcgtgggtggctcacatcagaaggcaaagagatcaaaaataaagacgagatcttggccctactaaaagccctctttctgcccaaaagacttagcataatccattgtccaggacatcaaaagggacacagcgccgaggctagaggcaaccggatggctgaccaagcggcccgaaaggcagccatcacagagactccagacacctctaccctcctcatagaaaattcatcaccctctggcggctcaaaaagaaccgccgacggcagcgaattcgagcccaagaagaagaggaaagtc

SEQ ID NO: 27 - RNA, 6351 nt, synthetic construct
  misc_feature 1..6351: note = Description of Artificial Sequence: Synthetic polynucleotide
  source 1..6351: mol_type = other RNA
atgaaacgtacagccgacggaagcgagttcgagtcaccaaagaagaagcggaaagtcgacaagaagtacagcatcggcctggacatcggcaccaactctgtgggctgggccgtgatcaccgacgagtacaaggtgcccagcaagaaattcaaggtgctgggcaacaccgaccggcacagcatcaagaagaacctgatcggagccctgctgttcgacagcggcgaaacagccgaggccacccggctgaagagaaccgccagaagaagatacaccagacggaagaaccggatctgctatctgcaagagatcttcagcaacgagatggccaaggtggacgacagcttcttccacagactggaagagtccttcctggtggaagaggataagaagcacgagcggcaccccatcttcggcaacatcgtggacgaggtggcctaccacgagaagtaccccaccatctaccacctgagaaagaaactggtggacagcaccgacaaggccgacctgcggctgatctatctggccctggcccacatgatcaagttccggggccacttcctgatcgagggcgacctgaaccccgacaacagcgacgtggacaagctgttcatccagctggtgcagacctacaaccagctgttcgaggaaaaccccatcaacgccagcggcgtggacgccaaggccatcctgtctgccagactgagcaagagcagacggctggaaaatctgatcgcccagctgcccggcgagaagaagaatggcctgttcggaaacctgattgccctgagcctgggcctgacccccaacttcaagagcaacttcgacctggccgaggatgccaaactgcagctgagcaaggacacctacgacgacgacctggacaacctgctggcccagatcggcgaccagtacgccgacctgtttctggccgccaagaacctgtccgacgccatcctgctgagcgacatcctgagagtgaacaccgagatcaccaaggcccccctgagcgcctctatgatcaagagatacgacgagcaccaccaggacctgaccctgctgaaagctctcgtgcggcagcagctgcctgagaagtacaaagagattttcttcgaccagagcaagaacggctacgccggctacattgacggcggagccagccaggaagagttctacaagttcatcaagcccatcctggaaaagatggacggcaccgaggaactgctcgtgaagctgaacagagaggacctgctgcggaagcagcggaccttcgacaacggcagcatcccccaccagatccacctgggagagctgcacgccattctgcggcggcaggaagatttttacccattcctgaaggacaaccgggaaaagatcgagaagatcctgaccttccgcatcccctactacgtgggccctctggccaggggaaacagcagattcgcctggatgaccagaaagagcgaggaaaccatcaccccctggaacttcgaggaagtggtggacaagggcgcttccgcccagagcttcatcgagcggatgaccaacttcgataagaacctgcccaacgagaaggtgctgcccaagcacagcctgctgtacgagtacttcaccgtgtataacgagctgaccaaagtgaaatacgtgaccgagggaatgagaaagcccgccttcctgagcggcgagcagaaaaaggccatcgtggacctgctgttcaagaccaaccggaaagtgaccgtgaagcagctgaaagaggactacttcaagaaaatcgagtgcttcgactccgtggaaatctccggcgtggaagatcggttcaacgcctccctgggcacataccacgatctgctgaaaattatcaaggacaaggacttcctggacaatgaggaaaacgaggacattctggaagatatcgtgctgaccctgacactgtttgaggacagagagatgatcgaggaacggctgaaaacctatgcccacctgttcgacgacaaagtgatgaagcagctgaagcggcggagatacaccggctggggcaggctgagccggaagctgatcaacggcatccgggacaagcagtccggcaagacaatcctggatttcctgaagtccgacggcttcgccaacagaaacttcatgcagctgatccacgacgacagcctgacctttaaagaggacatccagaaagcccaggtgtccggccagggcgatagcctgcacgagcacattgccaatctggccggcagccccgccattaagaagggcatcctgcagacagtgaaggtggtggacgagctcgtgaaagtgatgggccggcacaagcccgagaacatcgtgatcgaaatggccagagagaaccagaccacccagaagggacagaagaacagccgcgagagaatgaagcggatcgaagagggcatcaaagagctgggcagccagatcctgaaagaacaccccgtggaaaacacccagctgcagaacgagaagctgtacctgtactacctgcagaatgggcgggatatgtacgtggaccaggaactggacatcaaccggctgtccgactacgatgtggacgctatcgtgcctcagagctttctgaaggacgactccatcgacaacaaggtgctgaccagaagcgacaagaaccggggcaagagcgacaacgtgccctccgaagaggtcgtgaagaagatgaagaactactggcggcagctgctgaacgccaagctgattacccagagaaagttcgacaatctgaccaaggccgagagaggcggcctgagcgaactggataaggccggcttcatcaagagacagctggtggaaacccggcagatcacaaagcacgtggcacagatcctggactcccggatgaacactaagtacgacgagaatgacaagctgatccgggaagtgaaagtgatcaccctgaagtccaagctggtgtccgatttccggaaggatttccagttttacaaagtgcgcgagatcaacaactaccaccacgcccacgacgcctacctgaacgccgtcgtgggaaccgccctgatcaaaaagtaccctaagctggaaagcgagttcgtgtacggcgactacaaggtgtacgacgtgcggaagatgatcgccaagagcgagcaggaaatcggcaaggctaccgccaagtacttcttctacagcaacatcatgaactttttcaagaccgagattaccctggccaacggcgagatccggaagcggcctctgatcgagacaaacggcgaaaccggggagatcgtgtgggataagggccgggattttgccaccgtgcggaaagtgctgagcatgccccaagtgaatatcgtgaaaaagaccgaggtgcagacaggcggcttcagcaaagagtctatcctgcccaagaggaacagcgataagctgatcgccagaaagaaggactgggaccctaagaagtacggcggcttcgacagccccaccgtggcctattctgtgctggtggtggccaaagtggaaaagggcaagtccaagaaactgaagagtgtgaaagagctgctggggatcaccatcatggaaagaagcagcttcgagaagaatcccatcgactttctggaagccaagggctacaaagaagtgaaaaaggacctgatcatcaagctgcctaagtactccctgttcgagctggaaaacggccggaagagaatgctggcctctgccggcgaactgcagaagggaaacgaactggccctgccctccaaatatgtgaacttcctgtacctggccagccactatgagaagctgaagggctcccccgaggataatgagcagaaacagctgtttgtggaacagcacaagcactacctggacgagatcatcgagcagatcagcgagttctccaagagagtgatcctggccgacgctaatctggacaaagtgctgtccgcctacaacaagcaccgggataagcccatcagagagcaggccgagaatatcatccacctgtttaccctgaccaatctgggagcccctgccgccttcaagtactttgacaccaccatcgaccggaagaggtacaccagcaccaaagaggtgctggacgccaccctgatccaccagagcatcaccggcctgtacgagacacggatcgacctgtctcagctgggaggtgactctggaggatctagcggaggatcctctggcagcgagacaccaggaacaagcgagtcagcaacaccagagagcagtggcggcagcagcggcggcagcagcaccctaaatatagaagatgagtatcggctacatgagacctcaaaagagccagatgtttctctagggtccacatggctgtctgattttcctcaggcctgggcggaaaccgggggcatgggactggcagttcgccaagctcctctgatcatacctctgaaagcaacctctacccccgtgtccataaaacaataccccatgtcacaagaagccagactggggatcaagccccacatacagagactgttggaccagggaatactggtaccctgccagtccccctggaacacgcccctgctacccgttaagaaaccagggactaatgattataggcctgtccaggatctgagagaagtcaacaagcgggtggaagatatccaccccaccgtgcccaacccttacaacctcttgagcgggctcccaccgtcccaccagtggtacactgtgcttgatttaaaggatgcctttttctgcctgagactccaccccaccagtcagcctctcttcgcctttgagtggagagatccagagatgggaatctcaggacaattgacctggaccagactcccacagggtttcaaaaacagtcccaccctgtttaatgaggcactgcacagagacctagcagacttccggatccagcacccagacttgatcctgctacagtacgtggatgacttactgctggccgccacttctgagctagactgccaacaaggtactcgggccctgttacaaaccctagggaacctcgggtatcgggcctcggccaagaaagcccaaatttgccagaaacaggtcaagtatctggggtatcttctaaaagagggtcagagatggctgactgaggccagaaaagagactgtgatggggcagcctactcctaagacccctcgacaactaagggagttcctagggaaggcaggcttctgtcgcctcttcatccctgggtttgcagaaatggcagcccccctgtaccctctcaccaaaccggggactctgtttaattggggcccagaccaacaaaaggcctatcaagaaatcaagcaagctcttctaactgccccagccctggggttgccagatttgactaagccctttgaactctttgtcgacgagaagcagggctacgccaaaggtgtcctaacgcaaaaactgggaccttggcgtcggccggtggcctacctgtccaaaaagctagacccagtagcagctgggtggcccccttgcctacggatggtagcagccattgccgtactgacaaaggatgcaggcaagctaaccatgggacagccactagtcattctggccccccatgcagtagaggcactagtcaaacaaccccccgaccgctggctttccaacgcccggatgactcactatcaggccttgcttttggacacggaccgggtccagttcggaccggtggtagccctgaacccggctacgctgctcccactgcctgaggaagggctgcaacacaactgccttgatatcctggccgaagcccacggaacccgacccgacctaacggaccagccgctcccagacgccgaccacacctggtacacggatggaagcagtctcttacaagagggacagcgtaaggcgggagctgcggtgaccaccgagaccgaggtaatctgggctaaagccctgccagccgggacatccgctcagcgggctgaactgatagcactcacccaggccctaaagatggcagaaggtaagaagctaaatgtttatactgatagccgttatgcttttgctactgcccatatccatggagaaatatacagaaggcgtgggtggctcacatcagaaggcaaagagatcaaaaataaagacgagatcttggccctactaaaagccctctttctgcccaaaagacttagcataatccattgtccaggacatcaaaagggacacagcgccgaggctagaggcaaccggatggctgaccaagcggcccgaaaggcagccatcacagagactccagacacctctaccctcctcatagaaaattcatcaccctctggcggctcaaaaagaaccgccgacggcagcgaattcgagcccaagaagaagaggaaagtc

SEQ ID NO: 28 - DNA, 2031 bp, synthetic construct
  misc_feature 1..2031: note = Description of Artificial Sequence: Synthetic polypeptide
  source 1..2031: mol_type = other DNA
accctaaatatagaagatgagtatcggctacatgagacctcaaaagagccagatgtttctctagggtccacatggctgtctgattttcctcaggcctgggcggaaaccgggggcatgggactggcagttcgccaagctcctctgatcatacctctgaaagcaacctctacccccgtgtccataaaacaataccccatgtcacaagaagccagactggggatcaagccccacatacagagactgttggaccagggaatactggtaccctgccagtccccctggaacacgcccctgctacccgttaagaaaccagggactaatgattataggcctgtccaggatctgagagaagtcaacaagcgggtggaagatatccaccccaccgtgcccaacccttacaacctcttgagcgggctcccaccgtcccaccagtggtacactgtgcttgatttaaaggatgcctttttctgcctgagactccaccccaccagtcagcctctcttcgcctttgagtggagagatccagagatgggaatctcaggacaattgacctggaccagactcccacagggtttcaaaaacagtcccaccctgtttaatgaggcactgcacagagacctagcagacttccggatccagcacccagacttgatcctgctacagtacgtggatgacttactgctggccgccacttctgagctagactgccaacaaggtactcgggccctgttacaaaccctagggaacctcgggtatcgggcctcggccaagaaagcccaaatttgccagaaacaggtcaagtatctggggtatcttctaaaagagggtcagagatggctgactgaggccagaaaagagactgtgatggggcagcctactcctaagacccctcgacaactaagggagttcctagggaaggcaggcttctgtcgcctcttcatccctgggtttgcagaaatggcagcccccctgtaccctctcaccaaaccggggactctgtttaattggggcccagaccaacaaaaggcctatcaagaaatcaagcaagctcttctaactgccccagccctggggttgccagatttgactaagccctttgaactctttgtcgacgagaagcagggctacgccaaaggtgtcctaacgcaaaaactgggaccttggcgtcggccggtggcctacctgtccaaaaagctagacccagtagcagctgggtggcccccttgcctacggatggtagcagccattgccgtactgacaaaggatgcaggcaagctaaccatgggacagccactagtcattctggccccccatgcagtagaggcactagtcaaacaaccccccgaccgctggctttccaacgcccggatgactcactatcaggccttgcttttggacacggaccgggtccagttcggaccggtggtagccctgaacccggctacgctgctcccactgcctgaggaagggctgcaacacaactgccttgatatcctggccgaagcccacggaacccgacccgacctaacggaccagccgctcccagacgccgaccacacctggtacacggatggaagcagtctcttacaagagggacagcgtaaggcgggagctgcggtgaccaccgagaccgaggtaatctgggctaaagccctgccagccgggacatccgctcagcgggctgaactgatagcactcacccaggccctaaagatggcagaaggtaagaagctaaatgtttatactgatagccgttatgcttttgctactgcccatatccatggagaaatatacagaaggcgtgggtggctcacatcagaaggcaaagagatcaaaaataaagacgagatcttggccctactaaaagccctctttctgcccaaaagacttagcataatccattgtccaggacatcaaaagggacacagcgccgaggctagaggcaaccggatggctgaccaagcggcccgaaaggcagccatcacagagactccagacacctctaccctcctcatagaaaattcatcaccc

SEQ ID NO: 29 - RNA, 2031 nt, synthetic construct
  misc_feature 1..2031: note = Description of Artificial Sequence: Synthetic polypeptide
  source 1..2031: mol_type = other RNA
accctaaatatagaagatgagtatcggctacatgagacctcaaaagagccagatgtttctctagggtccacatggctgtctgattttcctcaggcctgggcggaaaccgggggcatgggactggcagttcgccaagctcctctgatcatacctctgaaagcaacctctacccccgtgtccataaaacaataccccatgtcacaagaagccagactggggatcaagccccacatacagagactgttggaccagggaatactggtaccctgccagtccccctggaacacgcccctgctacccgttaagaaaccagggactaatgattataggcctgtccaggatctgagagaagtcaacaagcgggtggaagatatccaccccaccgtgcccaacccttacaacctcttgagcgggctcccaccgtcccaccagtggtacactgtgcttgatttaaaggatgcctttttctgcctgagactccaccccaccagtcagcctctcttcgcctttgagtggagagatccagagatgggaatctcaggacaattgacctggaccagactcccacagggtttcaaaaacagtcccaccctgtttaatgaggcactgcacagagacctagcagacttccggatccagcacccagacttgatcctgctacagtacgtggatgacttactgctggccgccacttctgagctagactgccaacaaggtactcgggccctgttacaaaccctagggaacctcgggtatcgggcctcggccaagaaagcccaaatttgccagaaacaggtcaagtatctggggtatcttctaaaagagggtcagagatggctgactgaggccagaaaagagactgtgatggggcagcctactcctaagacccctcgacaactaagggagttcctagggaaggcaggcttctgtcgcctcttcatccctgggtttgcagaaatggcagcccccctgtaccctctcaccaaaccggggactctgtttaattggggcccagaccaacaaaaggcctatcaagaaatcaagcaagctcttctaactgccccagccctggggttgccagatttgactaagccctttgaactctttgtcgacgagaagcagggctacgccaaaggtgtcctaacgcaaaaactgggaccttggcgtcggccggtggcctacctgtccaaaaagctagacccagtagcagctgggtggcccccttgcctacggatggtagcagccattgccgtactgacaaaggatgcaggcaagctaaccatgggacagccactagtcattctggccccccatgcagtagaggcactagtcaaacaaccccccgaccgctggctttccaacgcccggatgactcactatcaggccttgcttttggacacggaccgggtccagttcggaccggtggtagccctgaacccggctacgctgctcccactgcctgaggaagggctgcaacacaactgccttgatatcctggccgaagcccacggaacccgacccgacctaacggaccagccgctcccagacgccgaccacacctggtacacggatggaagcagtctcttacaagagggacagcgtaaggcgggagctgcggtgaccaccgagaccgaggtaatctgggctaaagccctgccagccgggacatccgctcagcgggctgaactgatagcactcacccaggccctaaagatggcagaaggtaagaagctaaatgtttatactgatagccgttatgcttttgctactgcccatatccatggagaaatatacagaaggcgtgggtggctcacatcagaaggcaaagagatcaaaaataaagacgagatcttggccctactaaaagccctctttctgcccaaaagacttagcataatccattgtccaggacatcaaaagggacacagcgccgaggctagaggcaaccggatggctgaccaagcggcccgaaaggcagccatcacagagactccagacacctctaccctcctcatagaaaattcatcaccc

SEQ ID NO: 30 - DNA, 6231 bp, synthetic construct
  misc_feature 1..6231: note = Description of Artificial Sequence: Synthetic polynucleotide
  source 1..6231: mol_type = other DNA
gacaagaagtacagcatcggcctggacatcggcaccaactctgtgggctgggccgtgatcaccgacgagtacaaggtgcccagcaagaaattcaaggtgctgggcaacaccgaccggcacagcatcaagaagaacctgatcggagccctgctgttcgacagcggcgaaacagccgaggccacccggctgaagagaaccgccagaagaagatacaccagacggaagaaccggatctgctatctgcaagagatcttcagcaacgagatggccaaggtggacgacagcttcttccacagactggaagagtccttcctggtggaagaggataagaagcacgagcggcaccccatcttcggcaacatcgtggacgaggtggcctaccacgagaagtaccccaccatctaccacctgagaaagaaactggtggacagcaccgacaaggccgacctgcggctgatctatctggccctggcccacatgatcaagttccggggccacttcctgatcgagggcgacctgaaccccgacaacagcgacgtggacaagctgttcatccagctggtgcagacctacaaccagctgttcgaggaaaaccccatcaacgccagcggcgtggacgccaaggccatcctgtctgccagactgagcaagagcagacggctggaaaatctgatcgcccagctgcccggcgagaagaagaatggcctgttcggaaacctgattgccctgagcctgggcctgacccccaacttcaagagcaacttcgacctggccgaggatgccaaactgcagctgagcaaggacacctacgacgacgacctggacaacctgctggcccagatcggcgaccagtacgccgacctgtttctggccgccaagaacctgtccgacgccatcctgctgagcgacatcctgagagtgaacaccgagatcaccaaggcccccctgagcgcctctatgatcaagagatacgacgagcaccaccaggacctgaccctgctgaaagctctcgtgcggcagcagctgcctgagaagtacaaagagattttcttcgaccagagcaagaacggctacgccggctacattgacggcggagccagccaggaagagttctacaagttcatcaagcccatcctggaaaagatggacggcaccgaggaactgctcgtgaagctgaacagagaggacctgctgcggaagcagcggaccttcgacaacggcagcatcccccaccagatccacctgggagagctgcacgccattctgcggcggcaggaagatttttacccattcctgaaggacaaccgggaaaagatcgagaagatcctgaccttccgcatcccctactacgtgggccctctggccaggggaaacagcagattcgcctggatgaccagaaagagcgaggaaaccatcaccccctggaacttcgaggaagtggtggacaagggcgcttccgcccagagcttcatcgagcggatgaccaacttcgataagaacctgcccaacgagaaggtgctgcccaagcacagcctgctgtacgagtacttcaccgtgtataacgagctgaccaaagtgaaatacgtgaccgagggaatgagaaagcccgccttcctgagcggcgagcagaaaaaggccatcgtggacctgctgttcaagaccaaccggaaagtgaccgtgaagcagctgaaagaggactacttcaagaaaatcgagtgcttcgactccgtggaaatctccggcgtggaagatcggttcaacgcctccctgggcacataccacgatctgctgaaaattatcaaggacaaggacttcctggacaatgaggaaaacgaggacattctggaagatatcgtgctgaccctgacactgtttgaggacagagagatgatcgaggaacggctgaaaacctatgcccacctgttcgacgacaaagtgatgaagcagctgaagcggcggagatacaccggctggggcaggctgagccggaagctgatcaacggcatccgggacaagcagtccggcaagacaatcctggatttcctgaagtccgacggcttcgccaacagaaacttcatgcagctgatccacgacgacagcctgacctttaaagaggacatccagaaagcccaggtgtccggccagggcgatagcctgcacgagcacattgccaatctggccggcagccccgccattaagaagggcatcctgcagacagtgaaggtggtggacgagctcgtgaaagtgatgggccggcacaagcccgagaacatcgtgatcgaaatggccagagagaaccagaccacccagaagggacagaagaacagccgcgagagaatgaagcggatcgaagagggcatcaaagagctgggcagccagatcctgaaagaacaccccgtggaaaacacccagctgcagaacgagaagctgtacctgtactacctgcagaatgggcgggatatgtacgtggaccaggaactggacatcaaccggctgtccgactacgatgtggacgctatcgtgcctcagagctttctgaaggacgactccatcgacaacaaggtgctgaccagaagcgacaagaaccggggcaagagcgacaacgtgccctccgaagaggtcgtgaagaagatgaagaactactggcggcagctgctgaacgccaagctgattacccagagaaagttcgacaatctgaccaaggccgagagaggcggcctgagcgaactggataaggccggcttcatcaagagacagctggtggaaacccggcagatcacaaagcacgtggcacagatcctggactcccggatgaacactaagtacgacgagaatgacaagctgatccgggaagtgaaagtgatcaccctgaagtccaagctggtgtccgatttccggaaggatttccagttttacaaagtgcgcgagatcaacaactaccaccacgcccacgacgcctacctgaacgccgtcgtgggaaccgccctgatcaaaaagtaccctaagctggaaagcgagttcgtgtacggcgactacaaggtgtacgacgtgcggaagatgatcgccaagagcgagcaggaaatcggcaaggctaccgccaagtacttcttctacagcaacatcatgaactttttcaagaccgagattaccctggccaacggcgagatccggaagcggcctctgatcgagacaaacggcgaaaccggggagatcgtgtgggataagggccgggattttgccaccgtgcggaaagtgctgagcatgccccaagtgaatatcgtgaaaaagaccgaggtgcagacaggcggcttcagcaaagagtctatcctgcccaagaggaacagcgataagctgatcgccagaaagaaggactgggaccctaagaagtacggcggcttcgacagccccaccgtggcctattctgtgctggtggtggccaaagtggaaaagggcaagtccaagaaactgaagagtgtgaaagagctgctggggatcaccatcatggaaagaagcagcttcgagaagaatcccatcgactttctggaagccaagggctacaaagaagtgaaaaaggacctgatcatcaagctgcctaagtactccctgttcgagctggaaaacggccggaagagaatgctggcctctgccggcgaactgcagaagggaaacgaactggccctgccctccaaatatgtgaacttcctgtacctggccagccactatgagaagctgaagggctcccccgaggataatgagcagaaacagctgtttgtggaacagcacaagcactacctggacgagatcatcgagcagatcagcgagttctccaagagagtgatcctggccgacgctaatctggacaaagtgctgtccgcctacaacaagcaccgggataagcccatcagagagcaggccgagaatatcatccacctgtttaccctgaccaatctgggagcccctgccgccttcaagtactttgacaccaccatcgaccggaagaggtacaccagcaccaaagaggtgctggacgccaccctgatccaccagagcatcaccggcctgtacgagacacggatcgacctgtctcagctgggaggtgactctggaggatctagcggaggatcctctggcagcgagacaccaggaacaagcgagtcagcaacaccagagagcagtggcggcagcagcggcggcagcagcaccctaaatatagaagatgagtatcggctacatgagacctcaaaagagccagatgtttctctagggtccacatggctgtctgattttcctcaggcctgggcggaaaccgggggcatgggactggcagttcgccaagctcctctgatcatacctctgaaagcaacctctacccccgtgtccataaaacaataccccatgtcacaagaagccagactggggatcaagccccacatacagagactgttggaccagggaatactggtaccctgccagtccccctggaacacgcccctgctacccgttaagaaaccagggactaatgattataggcctgtccaggatctgagagaagtcaacaagcgggtggaagatatccaccccaccgtgcccaacccttacaacctcttgagcgggctcccaccgtcccaccagtggtacactgtgcttgatttaaaggatgcctttttctgcctgagactccaccccaccagtcagcctctcttcgcctttgagtggagagatccagagatgggaatctcaggacaattgacctggaccagactcccacagggtttcaaaaacagtcccaccctgtttaatgaggcactgcacagagacctagcagacttccggatccagcacccagacttgatcctgctacagtacgtggatgacttactgctggccgccacttctgagctagactgccaacaaggtactcgggccctgttacaaaccctagggaacctcgggtatcgggcctcggccaagaaagcccaaatttgccagaaacaggtcaagtatctggggtatcttctaaaagagggtcagagatggctgactgaggccagaaaagagactgtgatggggcagcctactcctaagacccctcgacaactaagggagttcctagggaaggcaggcttctgtcgcctcttcatccctgggtttgcagaaatggcagcccccctgtaccctctcaccaaaccggggactctgtttaattggggcccagaccaacaaaaggcctatcaagaaatcaagcaagctcttctaactgccccagccctggggttgccagatttgactaagccctttgaactctttgtcgacgagaagcagggctacgccaaaggtgtcctaacgcaaaaactgggaccttggcgtcggccggtggcctacctgtccaaaaagctagacccagtagcagctgggtggcccccttgcctacggatggtagcagccattgccgtactgacaaaggatgcaggcaagctaaccatgggacagccactagtcattctggccccccatgcagtagaggcactagtcaaacaaccccccgaccgctggctttccaacgcccggatgactcactatcaggccttgcttttggacacggaccgggtccagttcggaccggtggtagccctgaacccggctacgctgctcccactgcctgaggaagggctgcaacacaactgccttgatatcctggccgaagcccacggaacccgacccgacctaacggaccagccgctcccagacgccgaccacacctggtacacggatggaagcagtctcttacaagagggacagcgtaaggcgggagctgcggtgaccaccgagaccgaggtaatctgggctaaagccctgccagccgggacatccgctcagcgggctgaactgatagcactcacccaggccctaaagatggcagaaggtaagaagctaaatgtttatactgatagccgttatgcttttgctactgcccatatccatggagaaatatacagaaggcgtgggtggctcacatcagaaggcaaagagatcaaaaataaagacgagatcttggccctactaaaagccctctttctgcccaaaagacttagcataatccattgtccaggacatcaaaagggacacagcgccgaggctagaggcaaccggatggctgaccaagcggcccgaaaggcagccatcacagagactccagacacctctaccctcctcatagaaaattcatcaccc

SEQ ID NO: 31 - RNA, 6231 nt, synthetic construct
  misc_feature 1..6231: note = Description of Artificial Sequence: Synthetic polynucleotide
  source 1..6231: mol_type = other RNA
gacaagaagtacagcatcggcctggacatcggcaccaactctgtgggctgggccgtgatcaccgacgagtacaaggtgcccagcaagaaattcaaggtgctgggcaacaccgaccggcacagcatcaagaagaacctgatcggagccctgctgttcgacagcggcgaaacagccgaggccacccggctgaagagaaccgccagaagaagatacaccagacggaagaaccggatctgctatctgcaagagatcttcagcaacgagatggccaaggtggacgacagcttcttccacagactggaagagtccttcctggtggaagaggataagaagcacgagcggcaccccatcttcggcaacatcgtggacgaggtggcctaccacgagaagtaccccaccatctaccacctgagaaagaaactggtggacagcaccgacaaggccgacctgcggctgatctatctggccctggcccacatgatcaagttccggggccacttcctgatcgagggcgacctgaaccccgacaacagcgacgtggacaagctgttcatccagctggtgcagacctacaaccagctgttcgaggaaaaccccatcaacgccagcggcgtggacgccaaggccatcctgtctgccagactgagcaagagcagacggctggaaaatctgatcgcccagctgcccggcgagaagaagaatggcctgttcggaaacctgattgccctgagcctgggcctgacccccaacttcaagagcaacttcgacctggccgaggatgccaaactgcagctgagcaaggacacctacgacgacgacctggacaacctgctggcccagatcggcgaccagtacgccgacctgtttctggccgccaagaacctgtccgacgccatcctgctgagcgacatcctgagagtgaacaccgagatcaccaaggcccccctgagcgcctctatgatcaagagatacgacgagcaccaccaggacctgaccctgctgaaagctctcgtgcggcagcagctgcctgagaagtacaaagagattttcttcgaccagagcaagaacggctacgccggctacattgacggcggagccagccaggaagagttctacaagttcatcaagcccatcctggaaaagatggacggcaccgaggaactgctcgtgaagctgaacagagaggacctgctgcggaagcagcggaccttcgacaacggcagcatcccccaccagatccacctgggagagctgcacgccattctgcggcggcaggaagatttttacccattcctgaaggacaaccgggaaaagatcgagaagatcctgaccttccgcatcccctactacgtgggccctctggccaggggaaacagcagattcgcctggatgaccagaaagagcgaggaaaccatcaccccctggaacttcgaggaagtggtggacaagggcgcttccgcccagagcttcatcgagcggatgaccaacttcgataagaacctgcccaacgagaaggtgctgcccaagcacagcctgctgtacgagtacttcaccgtgtataacgagctgaccaaagtgaaatacgtgaccgagggaatgagaaagcccgccttcctgagcggcgagcagaaaaaggccatcgtggacctgctgttcaagaccaaccggaaagtgaccgtgaagcagctgaaagaggactacttcaagaaaatcgagtgcttcgactccgtggaaatctccggcgtggaagatcggttcaacgcctccctgggcacataccacgatctgctgaaaattatcaaggacaaggacttcctggacaatgaggaaaacgaggacattctggaagatatcgtgctgaccctgacactgtttgaggacagagagatgatcgaggaacggctgaaaacctatgcccacctgttcgacgacaaagtgatgaagcagctgaagcggcggagatacaccggctggggcaggctgagccggaagctgatcaacggcatccgggacaagcagtccggcaagacaatcctggatttcctgaagtccgacggcttcgccaacagaaacttcatgcagctgatccacgacgacagcctgacctttaaagaggacatccagaaagcccaggtgtccggccagggcgatagcctgcacgagcacattgccaatctggccggcagccccgccattaagaagggcatcctgcagacagtgaaggtggtggacgagctcgtgaaagtgatgggccggcacaagcccgagaacatcgtgatcgaaatggccagagagaaccagaccacccagaagggacagaagaacagccgcgagagaatgaagcggatcgaagagggcatcaaagagctgggcagccagatcctgaaagaacaccccgtggaaaacacccagctgcagaacgagaagctgtacctgtactacctgcagaatgggcgggatatgtacgtggaccaggaactggacatcaaccggctgtccgactacgatgtggacgctatcgtgcctcagagctttctgaaggacgactccatcgacaacaaggtgctgaccagaagcgacaagaaccggggcaagagcgacaacgtgccctccgaagaggtcgtgaagaagatgaagaactactggcggcagctgctgaacgccaagctgattacccagagaaagttcgacaatctgaccaaggccgagagaggcggcctgagcgaactggataaggccggcttcatcaagagacagctggtggaaacccggcagatcacaaagcacgtggcacagatcctggactcccggatgaacactaagtacgacgagaatgacaagctgatccgggaagtgaaagtgatcaccctgaagtccaagctggtgtccgatttccggaaggatttccagttttacaaagtgcgcgagatcaacaactaccaccacgcccacgacgcctacctgaacgccgtcgtgggaaccgccctgatcaaaaagtaccctaagctggaaagcgagttcgtgtacggcgactacaaggtgtacgacgtgcggaagatgatcgccaagagcgagcaggaaatcggcaaggctaccgccaagtacttcttctacagcaacatcatgaactttttcaagaccgagattaccctggccaacggcgagatccggaagcggcctctgatcgagacaaacggcgaaaccggggagatcgtgtgggataagggccgggattttgccaccgtgcggaaagtgctgagcatgccccaagtgaatatcgtgaaaaagaccgaggtgcagacaggcggcttcagcaaagagtctatcctgcccaagaggaacagcgataagctgatcgccagaaagaaggactgggaccctaagaagtacggcggcttcgacagccccaccgtggcctattctgtgctggtggtggccaaagtggaaaagggcaagtccaagaaactgaagagtgtgaaagagctgctggggatcaccatcatggaaagaagcagcttcgagaagaatcccatcgactttctggaagccaagggctacaaagaagtgaaaaaggacctgatcatcaagctgcctaagtactccctgttcgagctggaaaacggccggaagagaatgctggcctctgccggcgaactgcagaagggaaacgaactggccctgccctccaaatatgtgaacttcctgtacctggccagccactatgagaagctgaagggctcccccgaggataatgagcagaaacagctgtttgtggaacagcacaagcactacctggacgagatcatcgagcagatcagcgagttctccaagagagtgatcctggccgacgctaatctggacaaagtgctgtccgcctacaacaagcaccgggataagcccatcagagagcaggccgagaatatcatccacctgtttaccctgaccaatctgggagcccctgccgccttcaagtactttgacaccaccatcgaccggaagaggtacaccagcaccaaagaggtgctggacgccaccctgatccaccagagcatcaccggcctgtacgagacacggatcgacctgtctcagctgggaggtgactctggaggatctagcggaggatcctctggcagcgagacaccaggaacaagcgagtcagcaacaccagagagcagtggcggcagcagcggcggcagcagcaccctaaatatagaagatgagtatcggctacatgagacctcaaaagagccagatgtttctctagggtccacatggctgtctgattttcctcaggcctgggcggaaaccgggggcatgggactggcagttcgccaagctcctctgatcatacctctgaaagcaacctctacccccgtgtccataaaacaataccccatgtcacaagaagccagactggggatcaagccccacatacagagactgttggaccagggaatactggtaccctgccagtccccctggaacacgcccctgctacccgttaagaaaccagggactaatgattataggcctgtccaggatctgagagaagtcaacaagcgggtggaagatatccaccccaccgtgcccaacccttacaacctcttgagcgggctcccaccgtcccaccagtggtacactgtgcttgatttaaaggatgcctttttctgcctgagactccaccccaccagtcagcctctcttcgcctttgagtggagagatccagagatgggaatctcaggacaattgacctggaccagactcccacagggtttcaaaaacagtcccaccctgtttaatgaggcactgcacagagacctagcagacttccggatccagcacccagacttgatcctgctacagtacgtggatgacttactgctggccgccacttctgagctagactgccaacaaggtactcgggccctgttacaaaccctagggaacctcgggtatcgggcctcggccaagaaagcccaaatttgccagaaacaggtcaagtatctggggtatcttctaaaagagggtcagagatggctgactgaggccagaaaagagactgtgatggggcagcctactcctaagacccctcgacaactaagggagttcctagggaaggcaggcttctgtcgcctcttcatccctgggtttgcagaaatggcagcccccctgtaccctctcaccaaaccggggactctgtttaattggggcccagaccaacaaaaggcctatcaagaaatcaagcaagctcttctaactgccccagccctggggttgccagatttgactaagccctttgaactctttgtcgacgagaagcagggctacgccaaaggtgtcctaacgcaaaaactgggaccttggcgtcggccggtggcctacctgtccaaaaagctagacccagtagcagctgggtggcccccttgcctacggatggtagcagccattgccgtactgacaaaggatgcaggcaagctaaccatgggacagccactagtcattctggccccccatgcagtagaggcactagtcaaacaaccccccgaccgctggctttccaacgcccggatgactcactatcaggccttgcttttggacacggaccgggtccagttcggaccggtggtagccctgaacccggctacgctgctcccactgcctgaggaagggctgcaacacaactgccttgatatcctggccgaagcccacggaacccgacccgacctaacggaccagccgctcccagacgccgaccacacctggtacacggatggaagcagtctcttacaagagggacagcgtaaggcgggagctgcggtgaccaccgagaccgaggtaatctgggctaaagccctgccagccgggacatccgctcagcgggctgaactgatagcactcacccaggccctaaagatggcagaaggtaagaagctaaatgtttatactgatagccgttatgcttttgctactgcccatatccatggagaaatatacagaaggcgtgggtggctcacatcagaaggcaaagagatcaaaaataaagacgagatcttggccctactaaaagccctctttctgcccaaaagacttagcataatccattgtccaggacatcaaaagggacacagcgccgaggctagaggcaaccggatggctgaccaagcggcccgaaaggcagccatcacagagactccagacacctctaccctcctcatagaaaattcatcaccc

SEQ ID NO: 32 - DNA, 6351 bp, synthetic construct
  misc_feature 1..6351: note = Description of Artificial Sequence: Synthetic polynucleotide
  source 1..6351: mol_type = other DNA
atgaaacggacagccgacggaagcgagttcgagtcaccaaagaagaagcggaaagtcgacaagaagtacagcatcggcctggacatcggcaccaactctgtgggctgggccgtgatcaccgacgagtacaaggtgcccagcaagaaattcaaggtgctgggcaacaccgaccggcacagcatcaagaagaacctgatcggagccctgctgttcgacagcggcgaaacagccgaggccacccggctgaagagaaccgccagaagaagatacaccagacggaagaaccggatctgctatctgcaagagatcttcagcaacgagatggccaaggtggacgacagcttcttccacagactggaagagtccttcctggtggaagaggataagaagcacgagcggcaccccatcttcggcaacatcgtggacgaggtggcctaccacgagaagtaccccaccatctaccacctgagaaagaaactggtggacagcaccgacaaggccgacctgcggctgatctatctggccctggcccacatgatcaagttccggggccacttcctgatcgagggcgacctgaaccccgacaacagcgacgtggacaagctgttcatccagctggtgcagacctacaaccagctgttcgaggaaaaccccatcaacgccagcggcgtggacgccaaggccatcctgtctgccagactgagcaagagcagacggctggaaaatctgatcgcccagctgcccggcgagaagaagaatggcctgttcggaaacctgattgccctgagcctgggcctgacccccaacttcaagagcaacttcgacctggccgaggatgccaaactgcagctgagcaaggacacctacgacgacgacctggacaacctgctggcccagatcggcgaccagtacgccgacctgtttctggccgccaagaacctgtccgacgccatcctgctgagcgacatcctgagagtgaacaccgagatcaccaaggcccccctgagcgcctctatgatcaagagatacgacgagcaccaccaggacctgaccctgctgaaagctctcgtgcggcagcagctgcctgagaagtacaaagagattttcttcgaccagagcaagaacggctacgccggctacattgacggcggagccagccaggaagagttctacaagttcatcaagcccatcctggaaaagatggacggcaccgaggaactgctcgtgaagctgaacagagaggacctgctgcggaagcagcggaccttcgacaacggcagcatcccccaccagatccacctgggagagctgcacgccattctgcggcggcaggaagatttttacccattcctgaaggacaaccgggaaaagatcgagaagatcctgaccttccgcatcccctactacgtgggccctctggccaggggaaacagcagattcgcctggatgaccagaaagagcgaggaaaccatcaccccctggaacttcgaggaagtggtggacaagggcgcttccgcccagagcttcatcgagcggatgaccaacttcgataagaacctgcccaacgagaaggtgctgcccaagcacagcctgctgtacgagtacttcaccgtgtataacgagctgaccaaagtgaaatacgtgaccgagggaatgagaaagcccgccttcctgagcggcgagcagaaaaaggccatcgtggacctgctgttcaagaccaaccggaaagtgaccgtgaagcagctgaaagaggactacttcaagaaaatcgagtgcttcgactccgtggaaatctccggcgtggaagatcggttcaacgcctccctgggcacataccacgatctgctgaaaattatcaaggacaaggacttcctggacaatgaggaaaacgaggacattctggaagatatcgtgctgaccctgacactgtttgaggacagagagatgatcgaggaacggctgaaaacctatgcccacctgttcgacgacaaagtgatgaagcagctgaagcggcggagatacaccggctggggcaggctgagccggaagctgatcaacggcatccgggacaagcagtccggcaagacaatcctggatttcctgaagtccgacggcttcgccaacagaaacttcatgcagctgatccacgacgacagcctgacctttaaagaggacatccagaaagcccaggtgtccggccagggcgatagcctgcacgagcacattgccaatctggccggcagccccgccattaagaagggcatcctgcagacagtgaaggtggtggacgagctcgtgaaagtgatgggccggcacaagcccgagaacatcgtgatcgaaatggccagagagaaccagaccacccagaagggacagaagaacagccgcgagagaatgaagcggatcgaagagggcatcaaagagctgggcagccagatcctgaaagaacaccccgtggaaaacacccagctgcagaacgagaagctgtacctgtactacctgcagaatgggcgggatatgtacgtggaccaggaactggacatcaaccggctgtccgactacgatgtggacgctatcgtgcctcagagctttctgaaggacgactccatcgacaacaaggtgctgaccagaagcgacaagaaccggggcaagagcgacaacgtgccctccgaagaggtcgtgaagaagatgaagaactactggcggcagctgctgaacgccaagctgattacccagagaaagttcgacaatctgaccaaggccgagagaggcggcctgagcgaactggataaggccggcttcatcaagagacagctggtggaaacccggcagatcacaaagcacgtggcacagatcctggactcccggatgaacactaagtacgacgagaatgacaagctgatccgggaagtgaaagtgatcaccctgaagtccaagctggtgtccgatttccggaaggatttccagttttacaaagtgcgcgagatcaacaactaccaccacgcccacgacgcctacctgaacgccgtcgtgggaaccgccctgatcaaaaagtaccctaagctggaaagcgagttcgtgtacggcgactacaaggtgtacgacgtgcggaagatgatcgccaagagcgagcaggaaatcggcaaggctaccgccaagtacttcttctacagcaacatcatgaactttttcaagaccgagattaccctggccaacggcgagatccggaagcggcctctgatcgagacaaacggcgaaaccggggagatcgtgtgggataagggccgggattttgccaccgtgcggaaagtgctgagcatgccccaagtgaatatcgtgaaaaagaccgaggtgcagacaggcggcttcagcaaagagtctatcctgcccaagaggaacagcgataagctgatcgccagaaagaaggactgggaccctaagaagtacggcggcttcgacagccccaccgtggcctattctgtgctggtggtggccaaagtggaaaagggcaagtccaagaaactgaagagtgtgaaagagctgctggggatcaccatcatggaaagaagcagcttcgagaagaatcccatcgactttctggaagccaagggctacaaagaagtgaaaaaggacctgatcatcaagctgcctaagtactccctgttcgagctggaaaacggccggaagagaatgctggcctctgccggcgaactgcagaagggaaacgaactggccctgccctccaaatatgtgaacttcctgtacctggccagccactatgagaagctgaagggctcccccgaggataatgagcagaaacagctgtttgtggaacagcacaagcactacctggacgagatcatcgagcagatcagcgagttctccaagagagtgatcctggccgacgctaatctggacaaagtgctgtccgcctacaacaagcaccgggataagcccatcagagagcaggccgagaatatcatccacctgtttaccctgaccaatctgggagcccctgccgccttcaagtactttgacaccaccatcgaccggaagaggtacaccagcaccaaagaggtgctggacgccaccctgatccaccagagcatcaccggcctgtacgagacacggatcgacctgtctcagctgggaggtgactctggaggatctagcggaggatcctctggcagcgagacaccaggaacaagcgagtcagcaacaccagagagcagtggcggcagcagcggcggcagcagcaccctaaatatagaagatgagtatcggctacatgagacctcaaaagagccagatgtttctctagggtccacatggctgtctgattttcctcaggcctgggcggaaaccgggggcatgggactggcagttcgccaagctcctctgatcatacctctgaaagcaacctctacccccgtgtccataaaacaataccccatgtcacaagaagccagactggggatcaagccccacatacagagactgttggaccagggaatactggtaccctgccagtccccctggaacacgcccctgctacccgttaagaaaccagggactaatgattataggcctgtccaggatctgagagaagtcaacaagcgggtggaagatatccaccccaccgtgcccaacccttacaacctcttgagcgggctcccaccgtcccaccagtggtacactgtgcttgatttaaaggatgcctttttctgcctgagactccaccccaccagtcagcctctcttcgcctttgagtggagagatccagagatgggaatctcaggacaattgacctggaccagactcccacagggtttcaaaaacagtcccaccctgtttaatgaggcactgcacagagacctagcagacttccggatccagcacccagacttgatcctgctacagtacgtggatgacttactgctggccgccacttctgagctagactgccaacaaggtactcgggccctgttacaaaccctagggaacctcgggtatcgggcctcggccaagaaagcccaaatttgccagaaacaggtcaagtatctggggtatcttctaaaagagggtcagagatggctgactgaggccagaaaagagactgtgatggggcagcctactcctaagacccctcgacaactaagggagttcctagggaaggcaggcttctgtcgcctcttcatccctgggtttgcagaaatggcagcccccctgtaccctctcaccaaaccggggactctgtttaattggggcccagaccaacaaaaggcctatcaagaaatcaagcaagctcttctaactgccccagccctggggttgccagatttgactaagccctttgaactctttgtcgacgagaagcagggctacgccaaaggtgtcctaacgcaaaaactgggaccttggcgtcggccggtggcctacctgtccaaaaagctagacccagtagcagctgggtggcccccttgcctacggatggtagcagccattgccgtactgacaaaggatgcaggcaagctaaccatgggacagccactagtcattctggccccccatgcagtagaggcactagtcaaacaaccccccgaccgctggctttccaacgcccggatgactcactatcaggccttgcttttggacacggaccgggtccagttcggaccggtggtagccctgaacccggctacgctgctcccactgcctgaggaagggctgcaacacaactgccttgatatcctggccgaagcccacggaacccgacccgacctaacggaccagccgctcccagacgccgaccacacctggtacacggatggaagcagtctcttacaagagggacagcgtaaggcgggagctgcggtgaccaccgagaccgaggtaatctgggctaaagccctgccagccgggacatccgctcagcgggctgaactgatagcactcacccaggccctaaagatggcagaaggtaagaagctaaatgtttatactgatagccgttatgcttttgctactgcccatatccatggagaaatatacagaaggcgtgggtggctcacatcagaaggcaaagagatcaaaaataaagacgagatcttggccctactaaaagccctctttctgcccaaaagacttagcataatccattgtccaggacatcaaaagggacacagcgccgaggctagaggcaaccggatggctgaccaagcggcccgaaaggcagccatcacagagactccagacacctctaccctcctcatagaaaattcatcaccctctggcggctcaaaaagaaccgccgacggcagcgaattcgagcccaagaagaagaggaaagtc

SEQ ID NO: 33 - RNA, 6351 nt, synthetic construct
  misc_feature 1..6351: note = Description of Artificial Sequence: Synthetic polynucleotide
  source 1..6351: mol_type = other RNA
atgaaacggacagccgacggaagcgagttcgagtcaccaaagaagaagcggaaagtcgacaagaagtacagcatcggcctggacatcggcaccaactctgtgggctgggccgtgatcaccgacgagtacaaggtgcccagcaagaaattcaaggtgctgggcaacaccgaccggcacagcatcaagaagaacctgatcggagccctgctgttcgacagcggcgaaacagccgaggccacccggctgaagagaaccgccagaagaagatacaccagacggaagaaccggatctgctatctgcaagagatcttcagcaacgagatggccaaggtggacgacagcttcttccacagactggaagagtccttcctggtggaagaggataagaagcacgagcggcaccccatcttcggcaacatcgtggacgaggtggcctaccacgagaagtaccccaccatctaccacctgagaaagaaactggtggacagcaccgacaaggccgacctgcggctgatctatctggccctggcccacatgatcaagttccggggccacttcctgatcgagggcgacctgaaccccgacaacagcgacgtggacaagctgttcatccagctggtgcagacctacaaccagctgttcgaggaaaaccccatcaacgccagcggcgtggacgccaaggccatcctgtctgccagactgagcaagagcagacggctggaaaatctgatcgcccagctgcccggcgagaagaagaatggcctgttcggaaacctgattgccctgagcctgggcctgacccccaacttcaagagcaacttcgacctggccgaggatgccaaactgcagctgagcaaggacacctacgacgacgacctggacaacctgctggcccagatcggcgaccagtacgccgacctgtttctggccgccaagaacctgtccgacgccatcctgctgagcgacatcctgagagtgaacaccgagatcaccaaggcccccctgagcgcctctatgatcaagagatacgacgagcaccaccaggacctgaccctgctgaaagctctcgtgcggcagcagctgcctgagaagtacaaagagattttcttcgaccagagcaagaacggctacgccggctacattgacggcggagccagccaggaagagttctacaagttcatcaagcccatcctggaaaagatggacggcaccgaggaactgctcgtgaagctgaacagagaggacctgctgcggaagcagcggaccttcgacaacggcagcatcccccaccagatccacctgggagagctgcacgccattctgcggcggcaggaagatttttacccattcctgaaggacaaccgggaaaagatcgagaagatcctgaccttccgcatcccctactacgtgggccctctggccaggggaaacagcagattcgcctggatgaccagaaagagcgaggaaaccatcaccccctggaacttcgaggaagtggtggacaagggcgcttccgcccagagcttcatcgagcggatgaccaacttcgataagaacctgcccaacgagaaggtgctgcccaagcacagcctgctgtacgagtacttcaccgtgtataacgagctgaccaaagtgaaatacgtgaccgagggaatgagaaagcccgccttcctgagcggcgagcagaaaaaggccatcgtggacctgctgttcaagaccaaccggaaagtgaccgtgaagcagctgaaagaggactacttcaagaaaatcgagtgcttcgactccgtggaaatctccggcgtggaagatcggttcaacgcctccctgggcacataccacgatctgctgaaaattatcaaggacaaggacttcctggacaatgaggaaaacgaggacattctggaagatatcgtgctgaccctgacactgtttgaggacagagagatgatcgaggaacggctgaaaacctatgcccacctgttcgacgacaaagtgatgaagcagctgaagcggcggagatacaccggctggggcaggctgagccggaagctgatcaacggcatccgggacaagcagtccggcaagacaatcctggatttcctgaagtccgacggcttcgccaacagaaacttcatgcagctgatccacgacgacagcctgacctttaaagaggacatccagaaagcccaggtgtccggccagggcgatagcctgcacgagcacattgccaatctggccggcagccccgccattaagaagggcatcctgcagacagtgaaggtggtggacgagctcgtgaaagtgatgggccggcacaagcccgagaacatcgtgatcgaaatggccagagagaaccagaccacccagaagggacagaagaacagccgcgagagaatgaagcggatcgaagagggcatcaaagagctgggcagccagatcctgaaagaacaccccgtggaaaacacccagctgcagaacgagaagctgtacctgtactacctgcagaatgggcgggatatgtacgtggaccaggaactggacatcaaccggctgtccgactacgatgtggacgctatcgtgcctcagagctttctgaaggacgactccatcgacaacaaggtgctgaccagaagcgacaagaaccggggcaagagcgacaacgtgccctccgaagaggtcgtgaagaagatgaagaactactggcggcagctgctgaacgccaagctgattacccagagaaagttcgacaatctgaccaaggccgagagaggcggcctgagcgaactggataaggccggcttcatcaagagacagctggtggaaacccggcagatcacaaagcacgtggcacagatcctggactcccggatgaacactaagtacgacgagaatgacaagctgatccgggaagtgaaagtgatcaccctgaagtccaagctggtgtccgatttccggaaggatttccagttttacaaagtgcgcgagatcaacaactaccaccacgcccacgacgcctacctgaacgccgtcgtgggaaccgccctgatcaaaaagtaccctaagctggaaagcgagttcgtgtacggcgactacaaggtgtacgacgtgcggaagatgatcgccaagagcgagcaggaaatcggcaaggctaccgccaagtacttcttctacagcaacatcatgaactttttcaagaccgagattaccctggccaacggcgagatccggaagcggcctctgatcgagacaaacggcgaaaccggggagatcgtgtgggataagggccgggattttgccaccgtgcggaaagtgctgagcatgccccaagtgaatatcgtgaaaaagaccgaggtgcagacaggcggcttcagcaaagagtctatcctgcccaagaggaacagcgataagctgatcgccagaaagaaggactgggaccctaagaagtacggcggcttcgacagccccaccgtggcctattctgtgctggtggtggccaaagtggaaaagggcaagtccaagaaactgaagagtgtgaaagagctgctggggatcaccatcatggaaagaagcagcttcgagaagaatcccatcgactttctggaagccaagggctacaaagaagtgaaaaaggacctgatcatcaagctgcctaagtactccctgttcgagctggaaaacggccggaagagaatgctggcctctgccggcgaactgcagaagggaaacgaactggccctgccctccaaatatgtgaacttcctgtacctggccagccactatgagaagctgaagggctcccccgaggataatgagcagaaacagctgtttgtggaacagcacaagcactacctggacgagatcatcgagcagatcagcgagttctccaagagagtgatcctggccgacgctaatctggacaaagtgctgtccgcctacaacaagcaccgggataagcccatcagagagcaggccgagaatatcatccacctgtttaccctgaccaatctgggagcccctgccgccttcaagtactttgacaccaccatcgaccggaagaggtacaccagcaccaaagaggtgctggacgccaccctgatccaccagagcatcaccggcctgtacgagacacggatcgacctgtctcagctgggaggtgactctggaggatctagcggaggatcctctggcagcgagacaccaggaacaagcgagtcagcaacaccagagagcagtggcggcagcagcggcggcagcagcaccctaaatatagaagatgagtatcggctacatgagacctcaaaagagccagatgtttctctagggtccacatggctgtctgattttcctcaggcctgggcggaaaccgggggcatgggactggcagttcgccaagctcctctgatcatacctctgaaagcaacctctacccccgtgtccataaaacaataccccatgtcacaagaagccagactggggatcaagccccacatacagagactgttggaccagggaatactggtaccctgccagtccccctggaacacgcccctgctacccgttaagaaaccagggactaatgattataggcctgtccaggatctgagagaagtcaacaagcgggtggaagatatccaccccaccgtgcccaacccttacaacctcttgagcgggctcccaccgtcccaccagtggtacactgtgcttgatttaaaggatgcctttttctgcctgagactccaccccaccagtcagcctctcttcgcctttgagtggagagatccagagatgggaatctcaggacaattgacctggaccagactcccacagggtttcaaaaacagtcccaccctgtttaatgaggcactgcacagagacctagcagacttccggatccagcacccagacttgatcctgctacagtacgtggatgacttactgctggccgccacttctgagctagactgccaacaaggtactcgggccctgttacaaaccctagggaacctcgggtatcgggcctcggccaagaaagcccaaatttgccagaaacaggtcaagtatctggggtatcttctaaaagagggtcagagatggctgactgaggccagaaaagagactgtgatggggcagcctactcctaagacccctcgacaactaagggagttcctagggaaggcaggcttctgtcgcctcttcatccctgggtttgcagaaatggcagcccccctgtaccctctcaccaaaccggggactctgtttaattggggcccagaccaacaaaaggcctatcaagaaatcaagcaagctcttctaactgccccagccctggggttgccagatttgactaagccctttgaactctttgtcgacgagaagcagggctacgccaaaggtgtcctaacgcaaaaactgggaccttggcgtcggccggtggcctacctgtccaaaaagctagacccagtagcagctgggtggcccccttgcctacggatggtagcagccattgccgtactgacaaaggatgcaggcaagctaaccatgggacagccactagtcattctggccccccatgcagtagaggcactagtcaaacaaccccccgaccgctggctttccaacgcccggatgactcactatcaggccttgcttttggacacggaccgggtccagttcggaccggtggtagccctgaacccggctacgctgctcccactgcctgaggaagggctgcaacacaactgccttgatatcctggccgaagcccacggaacccgacccgacctaacggaccagccgctcccagacgccgaccacacctggtacacggatggaagcagtctcttacaagagggacagcgtaaggcgggagctgcggtgaccaccgagaccgaggtaatctgggctaaagccctgccagccgggacatccgctcagcgggctgaactgatagcactcacccaggccctaaagatggcagaaggtaagaagctaaatgtttatactgatagccgttatgcttttgctactgcccatatccatggagaaatatacagaaggcgtgggtggctcacatcagaaggcaaagagatcaaaaataaagacgagatcttggccctactaaaagccctctttctgcccaaaagacttagcataatccattgtccaggacatcaaaagggacacagcgccgaggctagaggcaaccggatggctgaccaagcggcccgaaaggcagccatcacagagactccagacacctctaccctcctcatagaaaattcatcaccctctggcggctcaaaaagaaccgccgacggcagcgaattcgagcccaagaagaagaggaaagtc

SEQ ID NO: 34 - protein, 1942 aa, synthetic construct
  REGION 1..1942: note = Description of Artificial Sequence: Synthetic polypeptide
MKRTADGSEFESPKKKRKVDKKYSIGLDIGTNSVGWAVITDEYKVPSKKFKVLGNTDRHSIKKNLIGALLFDSGETAEATRLKRTARRRYTRRKNRICYLQEIFSNEMAKVDDSFFHRLEESFLVEEDKKHERHPIFGNIVDEVAYHEKYPTIYHLRKKLVDSTDKADLRLIYLALAHMIKFRGHFLIEGDLNPDNSDVDKLFIQLVQTYNQLFEENPINASGVDAKAILSARLSKSRRLENLIAQLPGEKKNGLFGNLIALSLGLTPNFKSNFDLAEDAKLQLSKDTYDDDLDNLLAQIGDQYADLFLAAKNLSDAILLSDILRVNTEITKAPLSASMIKRYDEHHQDLTLLKALVRQQLPEKYKEIFFDQSKNGYAGYIDGGASQEEFYKFIKPILEKMDGTEELLVKLNREDLLRKQRTFDNGSIPHQIHLGELHAILRRQEDFYPFLKDNREKIEKILTFRIPYYVGPLARGNSRFAWMTRKSEETITPWNFEEVVDKGASAQSFIERMTNFDKNLPNEKVLPKHSLLYEYFTVYNELTKVKYVTEGMRKPAFLSGEQKKAIVDLLFKTNRKVTVKQLKEDYFKKIECFDSVEISGVEDRFNASLGTYHDLLKIIKDKDFLDNEENEDILEDIVLTLTLFEDREMIEERLKTYAHLFDDKVMKQLKRRRYTGWGRLSRKLINGIRDKQSGKTILDFLKSDGFANRNFMQLIHDDSLTFKEDIQKAQVSGQGDSLHEHIANLAGSPAIKKGILQTVKVVDELVKVMGRHKPENIVIEMARENQTTQKGQKNSRERMKRIEEGIKELGSQILKEHPVENTQLQNEKLYLYYLQNGRDMYVDQELDINRLSDYDVDAIVPQSFLKDDSIDNKVLTRSDKNRGKSDNVPSEEVVKKMKNYWRQLLNAKLITQRKFDNLTKAERGGLSELDKAGFIKRQLVETRQITKHVAQILDSRMNTKYDENDKLIREVKVITLKSKLVSDFRKDFQFYKVREINNYHHAHDAYLNAVVGTALIKKYPKLESEFVYGDYKVYDVRKMIAKSEQEIGKATAKYFFYSNIMNFFKTEITLANGEIRKRPLIETNGETGEIVWDKGRDFATVRKVLSMPQVNIVKKTEVQTGGFSKESILPKRNSDKLIARKKDWDPKKYGGFDSPTVAYSVLVVAKVEKGKSKKLKSVKELLGITIMERSSFEKNPIDFLEAKGYKEVKKDLIIKLPKYSLFELENGRKRMLASAGELQKGNELALPSKYVNFLYLASHYEKLKGSPEDNEQKQLFVEQHKHYLDEIIEQISEFSKRVILADANLDKVLSAYNKHRDKPIREQAENIIHLFTLTNLGAPAAFKYFDTTIDRKRYTSTKEVLDATLIHQSITGLYETRIDLSQLGGDSGGSSGGSSGSETPGTSESATPESSGGSSGGSSTLNIEDEYRLHETSKEPDVSLGSTWLSDFPQAWAETGGMGLAVRQAPLIIPLKATSTPVSIKQYPMSQEARLGIKPHIQRLLDQGILVPCQSPWNTPLLPVKKPGTNDYRPVQDLREVNKRVEDIHPTVPNPYNLLSGLPPSHQWYTVLDLKDAFFCLRLHPTSQPLFAFEWRDPEMGISGQLTWTRLPQGFKNSPTLFNEALHRDLADFRIQHPDLILLQYVDDLLLAATSELDCQQGTRALLQTLGNLGYRASAKKAQICQKQVKYLGYLLKEGQRWLTEARKETVMGQPTPKTPRQLREFLGKAGFCRLFIPGFAEMAAPLYPLTKPGTLFNWGPDQQKAYQEIKQALLTAPALGLPDLTKPFELFVDEKQGYAKGVLTQKLGPWRRPVAYLSKKLDPVAAGWPPCLRMVAAIAVLTKDAGKLTMGQPLVILAPHAVEALVKQPPDRWLSNARMTHYQALLLDTDRVQFGPVVALNPATLLPLPEEGLQHNCLDILAEAHGGSKRTADGSEFEPKKKRKV

SEQ ID NO: 35 - protein, 1904 aa, synthetic construct
  REGION 1..1904: note = Description of Artificial Sequence: Synthetic polypeptide
DKKYSIGLDIGTNSVGWAVITDEYKVPSKKFKVLGNTDRHSIKKNLIGALLFDSGETAEATRLKRTARRRYTRRKNRICYLQEIFSNEMAKVDDSFFHRLEESFLVEEDKKHERHPIFGNIVDEVAYHEKYPTIYHLRKKLVDSTDKADLRLIYLALAHMIKFRGHFLIEGDLNPDNSDVDKLFIQLVQTYNQLFEENPINASGVDAKAILSARLSKSRRLENLIAQLPGEKKNGLFGNLIALSLGLTPNFKSNFDLAEDAKLQLSKDTYDDDLDNLLAQIGDQYADLFLAAKNLSDAILLSDILRVNTEITKAPLSASMIKRYDEHHQDLTLLKALVRQQLPEKYKEIFFDQSKNGYAGYIDGGASQEEFYKFIKPILEKMDGTEELLVKLNREDLLRKQRTFDNGSIPHQIHLGELHAILRRQEDFYPFLKDNREKIEKILTFRIPYYVGPLARGNSRFAWMTRKSEETITPWNFEEVVDKGASAQSFIERMTNFDKNLPNEKVLPKHSLLYEYFTVYNELTKVKYVTEGMRKPAFLSGEQKKAIVDLLFKTNRKVTVKQLKEDYFKKIECFDSVEISGVEDRFNASLGTYHDLLKIIKDKDFLDNEENEDILEDIVLTLTLFEDREMIEERLKTYAHLFDDKVMKQLKRRRYTGWGRLSRKLINGIRDKQSGKTILDFLKSDGFANRNFMQLIHDDSLTFKEDIQKAQVSGQGDSLHEHIANLAGSPAIKKGILQTVKVVDELVKVMGRHKPENIVIEMARENQTTQKGQKNSRERMKRIEEGIKELGSQILKEHPVENTQLQNEKLYLYYLQNGRDMYVDQELDINRLSDYDVDAIVPQSFLKDDSIDNKVLTRSDKNRGKSDNVPSEEVVKKMKNYWRQLLNAKLITQRKFDNLTKAERGGLSELDKAGFIKRQLVETRQITKHVAQILDSRMNTKYDENDKLIREVKVITLKSKLVSDFRKDFQFYKVREINNYHHAHDAYLNAVVGTALIKKYPKLESEFVYGDYKVYDVRKMIAKSEQEIGKATAKYFFYSNIMNFFKTEITLANGEIRKRPLIETNGETGEIVWDKGRDFATVRKVLSMPQVNIVKKTEVQTGGFSKESILPKRNSDKLIARKKDWDPKKYGGFDSPTVAYSVLVVAKVEKGKSKKLKSVKELLGITIMERSSFEKNPIDFLEAKGYKEVKKDLIIKLPKYSLFELENGRKRMLASAGELQKGNELALPSKYVNFLYLASHYEKLKGSPEDNEQKQLFVEQHKHYLDEIIEQISEFSKRVILADANLDKVLSAYNKHRDKPIREQAENIIHLFTLTNLGAPAAFKYFDTTIDRKRYTSTKEVLDATLIHQSITGLYETRIDLSQLGGDSGGSSGGSSGSETPGTSESATPESSGGSSGGSSTLNIEDEYRLHETSKEPDVSLGSTWLSDFPQAWAETGGMGLAVRQAPLIIPLKATSTPVSIKQYPMSQEARLGIKPHIQRLLDQGILVPCQSPWNTPLLPVKKPGTNDYRPVQDLREVNKRVEDIHPTVPNPYNLLSGLPPSHQWYTVLDLKDAFFCLRLHPTSQPLFAFEWRDPEMGISGQLTWTRLPQGFKNSPTLFNEALHRDLADFRIQHPDLILLQYVDDLLLAATSELDCQQGTRALLQTLGNLGYRASAKKAQICQKQVKYLGYLLKEGQRWLTEARKETVMGQPTPKTPRQLREFLGKAGFCRLFIPGFAEMAAPLYPLTKPGTLFNWGPDQQKAYQEIKQALLTAPALGLPDLTKPFELFVDEKQGYAKGVLTQKLGPWRRPVAYLSKKLDPVAAGWPPCLRMVAAIAVLTKDAGKLTMGQPLVILAPHAVEALVKQPPDRWLSNARMTHYQALLLDTDRVQFGPVVALNPATLLPLPEEGLQHNCLDILAEAHG

SEQ ID NO: 36 - protein, 504 aa, synthetic construct
  REGION 1..504: note = Description of Artificial Sequence: Synthetic polypeptide
TLNIEDEYRLHETSKEPDVSLGSTWLSDFPQAWAETGGMGLAVRQAPLIIPLKATSTPVSIKQYPMSQEARLGIKPHIQRLLDQGILVPCQSPWNTPLLPVKKPGTNDYRPVQDLREVNKRVEDIHPTVPNPYNLLSGLPPSHQWYTVLDLKDAFFCLRLHPTSQPLFAFEWRDPEMGISGQLTWTRLPQGFKNSPTLFNEALHRDLADFRIQHPDLILLQYVDDLLLAATSELDCQQGTRALLQTLGNLGYRASAKKAQICQKQVKYLGYLLKEGQRWLTEARKETVMGQPTPKTPRQLREFLGKAGFCRLFIPGFAEMAAPLYPLTKPGTLFNWGPDQQKAYQEIKQALLTAPALGLPDLTKPFELFVDEKQGYAKGVLTQKLGPWRRPVAYLSKKLDPVAAGWPPCLRMVAAIAVLTKDAGKLTMGQPLVILAPHAVEALVKQPPDRWLSNARMTHYQALLLDTDRVQFGPVVALNPATLLPLPEEGLQHNCLDILAEAHG

SEQ ID NO: 37 - DNA, 5826 bp, synthetic construct
  misc_feature 1..5826: note = Description of Artificial Sequence: Synthetic polynucleotide
  source 1..5826: mol_type = other DNA
atgaaacgtacagccgacggaagcgagttcgagtcaccaaagaagaagcggaaagtcgacaagaagtacagcatcggcctggacatcggcaccaactctgtgggctgggccgtgatcaccgacgagtacaaggtgcccagcaagaaattcaaggtgctgggcaacaccgaccggcacagcatcaagaagaacctgatcggagccctgctgttcgacagcggcgaaacagccgaggccacccggctgaagagaaccgccagaagaagatacaccagacggaagaaccggatctgctatctgcaagagatcttcagcaacgagatggccaaggtggacgacagcttcttccacagactggaagagtccttcctggtggaagaggataagaagcacgagcggcaccccatcttcggcaacatcgtggacgaggtggcctaccacgagaagtaccccaccatctaccacctgagaaagaaactggtggacagcaccgacaaggccgacctgcggctgatctatctggccctggcccacatgatcaagttccggggccacttcctgatcgagggcgacctgaaccccgacaacagcgacgtggacaagctgttcatccagctggtgcagacctacaaccagctgttcgaggaaaaccccatcaacgccagcggcgtggacgccaaggccatcctgtctgccagactgagcaagagcagacggctggaaaatctgatcgcccagctgcccggcgagaagaagaatggcctgttcggaaacctgattgccctgagcctgggcctgacccccaacttcaagagcaacttcgacctggccgaggatgccaaactgcagctgagcaaggacacctacgacgacgacctggacaacctgctggcccagatcggcgaccagtacgccgacctgtttctggccgccaagaacctgtccgacgccatcctgctgagcgacatcctgagagtgaacaccgagatcaccaaggcccccctgagcgcctctatgatcaagagatacgacgagcaccaccaggacctgaccctgctgaaagctctcgtgcggcagcagctgcctgagaagtacaaagagattttcttcgaccagagcaagaacggctacgccggctacattgacggcggagccagccaggaagagttctacaagttcatcaagcccatcctggaaaagatggacggcaccgaggaactgctcgtgaagctgaacagagaggacctgctgcggaagcagcggaccttcgacaacggcagcatcccccaccagatccacctgggagagctgcacgccattctgcggcggcaggaagatttttacccattcctgaaggacaaccgggaaaagatcgagaagatcctgaccttccgcatcccctactacgtgggccctctggccaggggaaacagcagattcgcctggatgaccagaaagagcgaggaaaccatcaccccctggaacttcgaggaagtggtggacaagggcgcttccgcccagagcttcatcgagcggatgaccaacttcgataagaacctgcccaacgagaaggtgctgcccaagcacagcctgctgtacgagtacttcaccgtgtataacgagctgaccaaagtgaaatacgtgaccgagggaatgagaaagcccgccttcctgagcggcgagcagaaaaaggccatcgtggacctgctgttcaagaccaaccggaaagtgaccgtgaagcagctgaaagaggactacttcaagaaaatcgagtgcttcgactccgtggaaatctccggcgtggaagatcggttcaacgcctccctgggcacataccacgatctgctgaaaattatcaaggacaaggacttcctggacaatgaggaaaacgaggacattctggaagatatcgtgctgaccctgacactgtttgaggacagagagatgatcgaggaacggctgaaaacctatgcccacctgttcgacgacaaagtgatgaagcagctgaagcggcggagatacaccggctggggcaggctgagccggaagctgatcaacggcatccgggacaagcagtccggcaagacaatcctggatttcctgaagtccgacggcttcgccaacagaaacttcatgcagctgatccacgacgacagcctgacctttaaagaggacatccagaaagcccaggtgtccggccagggcgatagcctgcacgagcacattgccaatctggccggcagccccgccattaagaagggcatcctgcagacagtgaaggtggtggacgagctcgtgaaagtgatgggccggcacaagcccgagaacatcgtgatcgaaatggccagagagaaccagaccacccagaagggacagaagaacagccgcgagagaatgaagcggatcgaagagggcatcaaagagctgggcagccagatcctgaaagaacaccccgtggaaaacacccagctgcagaacgagaagctgtacctgtactacctgcagaatgggcgggatatgtacgtggaccaggaactggacatcaaccggctgtccgactacgatgtggacgctatcgtgcctcagagctttctgaaggacgactccatcgacaacaaggtgctgaccagaagcgacaagaaccggggcaagagcgacaacgtgccctccgaagaggtcgtgaagaagatgaagaactactggcggcagctgctgaacgccaagctgattacccagagaaagttcgacaatctgaccaaggccgagagaggcggcctgagcgaactggataaggccggcttcatcaagagacagctggtggaaacccggcagatcacaaagcacgtggcacagatcctggactcccggatgaacactaagtacgacgagaatgacaagctgatccgggaagtgaaagtgatcaccctgaagtccaagctggtgtccgatttccggaaggatttccagttttacaaagtgcgcgagatcaacaactaccaccacgcccacgacgcctacctgaacgccgtcgtgggaaccgccctgatcaaaaagtaccctaagctggaaagcgagttcgtgtacggcgactacaaggtgtacgacgtgcggaagatgatcgccaagagcgagcaggaaatcggcaaggctaccgccaagtacttcttctacagcaacatcatgaactttttcaagaccgagattaccctggccaacggcgagatccggaagcggcctctgatcgagacaaacggcgaaaccggggagatcgtgtgggataagggccgggattttgccaccgtgcggaaagtgctgagcatgccccaagtgaatatcgtgaaaaagaccgaggtgcagacaggcggcttcagcaaagagtctatcctgcccaagaggaacagcgataagctgatcgccagaaagaaggactgggaccctaagaagtacggcggcttcgacagccccaccgtggcctattctgtgctggtggtggccaaagtggaaaagggcaagtccaagaaactgaagagtgtgaaagagctgctggggatcaccatcatggaaagaagcagcttcgagaagaatcccatcgactttctggaagccaagggctacaaagaagtgaaaaaggacctgatcatcaagctgcctaagtactccctgttcgagctggaaaacggccggaagagaatgctggcctctgccggcgaactgcagaagggaaacgaactggccctgccctccaaatatgtgaacttcctgtacctggccagccactatgagaagctgaagggctcccccgaggataatgagcagaaacagctgtttgtggaacagcacaagcactacctggacgagatcatcgagcagatcagcgagttctccaagagagtgatcctggccgacgctaatctggacaaagtgctgtccgcctacaacaagcaccgggataagcccatcagagagcaggccgagaatatcatccacctgtttaccctgaccaatctgggagcccctgccgccttcaagtactttgacaccaccatcgaccggaagaggtacaccagcaccaaagaggtgctggacgccaccctgatccaccagagcatcaccggcctgtacgagacacggatcgacctgtctcagctgggaggtgactctggaggatctagcggaggatcctctggcagcgagacaccaggaacaagcgagtcagcaacaccagagagcagtggcggcagcagcggcggcagcagcaccctaaatatagaagatgagtatcggctacatgagacctcaaaagagccagatgtttctctagggtccacatggctgtctgattttcctcaggcctgggcggaaaccgggggcatgggactggcagttcgccaagctcctctgatcatacctctgaaagcaacctctacccccgtgtccataaaacaataccccatgtcacaagaagccagactggggatcaagccccacatacagagactgttggaccagggaatactggtaccctgccagtccccctggaacacgcccctgctacccgttaagaaaccagggactaatgattataggcctgtccaggatctgagagaagtcaacaagcgggtggaagatatccaccccaccgtgcccaacccttacaacctcttgagcgggctcccaccgtcccaccagtggtacactgtgcttgatttaaaggatgcctttttctgcctgagactccaccccaccagtcagcctctcttcgcctttgagtggagagatccagagatgggaatctcaggacaattgacctggaccagactcccacagggtttcaaaaacagtcccaccctgtttaatgaggcactgcacagagacctagcagacttccggatccagcacccagacttgatcctgctacagtacgtggatgacttactgctggccgccacttctgagctagactgccaacaaggtactcgggccctgttacaaaccctagggaacctcgggtatcgggcctcggccaagaaagcccaaatttgccagaaacaggtcaagtatctggggtatcttctaaaagagggtcagagatggctgactgaggccagaaaagagactgtgatggggcagcctactcctaagacccctcgacaactaagggagttcctagggaaggcaggcttctgtcgcctcttcatccctgggtttgcagaaatggcagcccccctgtaccctctcaccaaaccggggactctgtttaattggggcccagaccaacaaaaggcctatcaagaaatcaagcaagctcttctaactgccccagccctggggttgccagatttgactaagccctttgaactctttgtcgacgagaagcagggctacgccaaaggtgtcctaacgcaaaaactgggaccttggcgtcggccggtggcctacctgtccaaaaagctagacccagtagcagctgggtggcccccttgcctacggatggtagcagccattgccgtactgacaaaggatgcaggcaagctaaccatgggacagccactagtcattctggccccccatgcagtagaggcactagtcaaacaaccccccgaccgctggctttccaacgcccggatgactcactatcaggccttgcttttggacacggaccgggtccagttcggaccggtggtagccctgaacccggctacgctgctcccactgcctgaggaagggctgcaacacaactgccttgatatcctggccgaagcccacggaggctcaaaaagaaccgccgacggcagcgaattcgagcccaagaagaagaggaaagtc

SEQ ID NO: 38 - RNA, 5826 nt, synthetic construct
  misc_feature 1..5826: note = Description of Artificial Sequence: Synthetic polynucleotide
  source 1..5826: mol_type = other RNA
atgaaacgtacagccgacggaagcgagttcgagtcaccaaagaagaagcggaaagtcgacaagaagtacagcatcggcctggacatcggcaccaactctgtgggctgggccgtgatcaccgacgagtacaaggtgcccagcaagaaattcaaggtgctgggcaacaccgaccggcacagcatcaagaagaacctgatcggagccctgctgttcgacagcggcgaaacagccgaggccacccggctgaagagaaccgccagaagaagatacaccagacggaagaaccggatctgctatctgcaagagatcttcagcaacgagatggccaaggtggacgacagcttcttccacagactggaagagtccttcctggtggaagaggataagaagcacgagcggcaccccatcttcggcaacatcgtggacgaggtggcctaccacgagaagtaccccaccatctaccacctgagaaagaaactggtggacagcaccgacaaggccgacctgcggctgatctatctggccctggcccacatgatcaagttccggggccacttcctgatcgagggcgacctgaaccccgacaacagcgacgtggacaagctgttcatccagctggtgcagacctacaaccagctgttcgaggaaaaccccatcaacgccagcggcgtggacgccaaggccatcctgtctgccagactgagcaagagcagacggctggaaaatctgatcgcccagctgcccggcgagaagaagaatggcctgttcggaaacctgattgccctgagcctgggcctgacccccaacttcaagagcaacttcgacctggccgaggatgccaaactgcagctgagcaaggacacctacgacgacgacctggacaacctgctggcccagatcggcgaccagtacgccgacctgtttctggccgccaagaacctgtccgacgccatcctgctgagcgacatcctgagagtgaacaccgagatcaccaaggcccccctgagcgcctctatgatcaagagatacgacgagcaccaccaggacctgaccctgctgaaagctctcgtgcggcagcagctgcctgagaagtacaaagagattttcttcgaccagagcaagaacggctacgccggctacattgacggcggagccagccaggaagagttctacaagttcatcaagcccatcctggaaaagatggacggcaccgaggaactgctcgtgaagctgaacagagaggacctgctgcggaagcagcggaccttcgacaacggcagcatcccccaccagatccacctgggagagctgcacgccattctgcggcggcaggaagatttttacccattcctgaaggacaaccgggaaaagatcgagaagatcctgaccttccgcatcccctactacgtgggccctctggccaggggaaacagcagattcgcctggatgaccagaaagagcgaggaaaccatcaccccctggaacttcgaggaagtggtggacaagggcgcttccgcccagagcttcatcgagcggatgaccaacttcgataagaacctgcccaacgagaaggtgctgcccaagcacagcctgctgtacgagtacttcaccgtgtataacgagctgaccaaagtgaaatacgtgaccgagggaatgagaaagcccgccttcctgagcggcgagcagaaaaaggccatcgtggacctgctgttcaagaccaaccggaaagtgaccgtgaagcagctgaaagaggactacttcaagaaaatcgagtgcttcgactccgtggaaatctccggcgtggaagatcggttcaacgcctccctgggcacataccacgatctgctgaaaattatcaaggacaaggacttcctggacaatgaggaaaacgaggacattctggaagatatcgtgctgaccctgacactgtttgaggacagagagatgatcgaggaacggctgaaaacctatgcccacctgttcgacgacaaagtgatgaagcagctgaagcggcggagatacaccggctggggcaggctgagccggaagctgatcaacggcatccgggacaagcagtccggcaagacaatcctggatttcctgaagtccgacggcttcgccaacagaaacttcatgcagctgatccacgacgacagcctgacctttaaagaggacatccagaaagcccaggtgtccggccagggcgatagcctgcacgagcacattgccaatctggccggcagccccgccattaagaagggcatcctgcagacagtgaaggtggtggacgagctcgtgaaagtgatgggccggcacaagcccgagaacatcgtgatcgaaatggccagagagaaccagaccacccagaagggacagaagaacagccgcgagagaatgaagcggatcgaagagggcatcaaagagctgggcagccagatcctgaaagaacaccccgtggaaaacacccagctgcagaacgagaagctgtacctgtactacctgcagaatgggcgggatatgtacgtggaccaggaactggacatcaaccggctgtccgactacgatgtggacgctatcgtgcctcagagctttctgaaggacgactccatcgacaacaaggtgctgaccagaagcgacaagaaccggggcaagagcgacaacgtgccctccgaagaggtcgtgaagaagatgaagaactactggcggcagctgctgaacgccaagctgattacccagagaaagttcgacaatctgaccaaggccgagagaggcggcctgagcgaactggataaggccggcttcatcaagagacagctggtggaaacccggcagatcacaaagcacgtggcacagatcctggactcccggatgaacactaagtacgacgagaatgacaagctgatccgggaagtgaaagtgatcaccctgaagtccaagctggtgtccgatttccggaaggatttccagttttacaaagtgcgcgagatcaacaactaccaccacgcccacgacgcctacctgaacgccgtcgtgggaaccgccctgatcaaaaagtaccctaagctggaaagcgagttcgtgtacggcgactacaaggtgtacgacgtgcggaagatgatcgccaagagcgagcaggaaatcggcaaggctaccgccaagtacttcttctacagcaacatcatgaactttttcaagaccgagattaccctggccaacggcgagatccggaagcggcctctgatcgagacaaacggcgaaaccggggagatcgtgtgggataagggccgggattttgccaccgtgcggaaagtgctgagcatgccccaagtgaatatcgtgaaaaagaccgaggtgcagacaggcggcttcagcaaagagtctatcctgcccaagaggaacagcgataagctgatcgccagaaagaaggactgggaccctaagaagtacggcggcttcgacagccccaccgtggcctattctgtgctggtggtggccaaagtggaaaagggcaagtccaagaaactgaagagtgtgaaagagctgctggggatcaccatcatggaaagaagcagcttcgagaagaatcccatcgactttctggaagccaagggctacaaagaagtgaaaaaggacctgatcatcaagctgcctaagtactccctgttcgagctggaaaacggccggaagagaatgctggcctctgccggcgaactgcagaagggaaacgaactggccctgccctccaaatatgtgaacttcctgtacctggccagccactatgagaagctgaagggctcccccgaggataatgagcagaaacagctgtttgtggaacagcacaagcactacctggacgagatcatcgagcagatcagcgagttctccaagagagtgatcctggccgacgctaatctggacaaagtgctgtccgcctacaacaagcaccgggataagcccatcagagagcaggccgagaatatcatccacctgtttaccctgaccaatctgggagcccctgccgccttcaagtactttgacaccaccatcgaccggaagaggtacaccagcaccaaagaggtgctggacgccaccctgatccaccagagcatcaccggcctgtacgagacacggatcgacctgtctcagctgggaggtgactctggaggatctagcggaggatcctctggcagcgagacaccaggaacaagcgagtcagcaacaccagagagcagtggcggcagcagcggcggcagcagcaccctaaatatagaagatgagtatcggctacatgagacctcaaaagagccagatgtttctctagggtccacatggctgtctgattttcctcaggcctgggcggaaaccgggggcatgggactggcagttcgccaagctcctctgatcatacctctgaaagcaacctctacccccgtgtccataaaacaataccccatgtcacaagaagccagactggggatcaagccccacatacagagactgttggaccagggaatactggtaccctgccagtccccctggaacacgcccctgctacccgttaagaaaccagggactaatgattataggcctgtccaggatctgagagaagtcaacaagcgggtggaagatatccaccccaccgtgcccaacccttacaacctcttgagcgggctcccaccgtcccaccagtggtacactgtgcttgatttaaaggatgcctttttctgcctgagactccaccccaccagtcagcctctcttcgcctttgagtggagagatccagagatgggaatctcaggacaattgacctggaccagactcccacagggtttcaaaaacagtcccaccctgtttaatgaggcactgcacagagacctagcagacttccggatccagcacccagacttgatcctgctacagtacgtggatgacttactgctggccgccacttctgagctagactgccaacaaggtactcgggccctgttacaaaccctagggaacctcgggtatcgggcctcggccaagaaagcccaaatttgccagaaacaggtcaagtatctggggtatcttctaaaagagggtcagagatggctgactgaggccagaaaagagactgtgatggggcagcctactcctaagacccctcgacaactaagggagttcctagggaaggcaggcttctgtcgcctcttcatccctgggtttgcagaaatggcagcccccctgtaccctctcaccaaaccggggactctgtttaattggggcccagaccaacaaaaggcctatcaagaaatcaagcaagctcttctaactgccccagccctggggttgccagatttgactaagccctttgaactctttgtcgacgagaagcagggctacgccaaaggtgtcctaacgcaaaaactgggaccttggcgtcggccggtggcctacctgtccaaaaagctagacccagtagcagctgggtggcccccttgcctacggatggtagcagccattgccgtactgacaaaggatgcaggcaagctaaccatgggacagccactagtcattctggccccccatgcagtagaggcactagtcaaacaaccccccgaccgctggctttccaacgcccggatgactcactatcaggccttgcttttggacacggaccgggtccagttcggaccggtggtagccctgaacccggctacgctgctcccactgcctgaggaagggctgcaacacaactgccttgatatcctggccgaagcccacggaggctcaaaaagaaccgccgacggcagcgaattcgagcccaagaagaagaggaaagtc

SEQ ID NO: 39 - DNA, 5712 bp, synthetic construct
  misc_feature 1..5712: note = Description of Artificial Sequence: Synthetic polynucleotide
  source 1..5712: mol_type = other DNA
gacaagaagtacagcatcggcctggacatcggcaccaactctgtgggctgggccgtgatcaccgacgagtacaaggtgcccagcaagaaattcaaggtgctgggcaacaccgaccggcacagcatcaagaagaacctgatcggagccctgctgttcgacagcggcgaaacagccgaggccacccggctgaagagaaccgccagaagaagatacaccagacggaagaaccggatctgctatctgcaagagatcttcagcaacgagatggccaaggtggacgacagcttcttccacagactggaagagtccttcctggtggaagaggataagaagcacgagcggcaccccatcttcggcaacatcgtggacgaggtggcctaccacgagaagtaccccaccatctaccacctgagaaagaaactggtggacagcaccgacaaggccgacctgcggctgatctatctggccctggcccacatgatcaagttccggggccacttcctgatcgagggcgacctgaaccccgacaacagcgacgtggacaagctgttcatccagctggtgcagacctacaaccagctgttcgaggaaaaccccatcaacgccagcggcgtggacgccaaggccatcctgtctgccagactgagcaagagcagacggctggaaaatctgatcgcccagctgcccggcgagaagaagaatggcctgttcggaaacctgattgccctgagcctgggcctgacccccaacttcaagagcaacttcgacctggccgaggatgccaaactgcagctgagcaaggacacctacgacgacgacctggacaacctgctggcccagatcggcgaccagtacgccgacctgtttctggccgccaagaacctgtccgacgccatcctgctgagcgacatcctgagagtgaacaccgagatcaccaaggcccccctgagcgcctctatgatcaagagatacgacgagcaccaccaggacctgaccctgctgaaagctctcgtgcggcagcagctgcctgagaagtacaaagagattttcttcgaccagagcaagaacggctacgccggctacattgacggcggagccagccaggaagagttctacaagttcatcaagcccatcctggaaaagatggacggcaccgaggaactgctcgtgaagctgaacagagaggacctgctgcggaagcagcggaccttcgacaacggcagcatcccccaccagatccacctgggagagctgcacgccattctgcggcggcaggaagatttttacccattcctgaaggacaaccgggaaaagatcgagaagatcctgaccttccgcatcccctactacgtgggccctctggccaggggaaacagcagattcgcctggatgaccagaaagagcgaggaaaccatcaccccctggaacttcgaggaagtggtggacaagggcgcttccgcccagagcttcatcgagcggatgaccaacttcgataagaacctgcccaacgagaaggtgctgcccaagcacagcctgctgtacgagtacttcaccgtgtataacgagctgaccaaagtgaaatacgtgaccgagggaatgagaaagcccgccttcctgagcggcgagcagaaaaaggccatcgtggacctgctgttcaagaccaaccggaaagtgaccgtgaagcagctgaaagaggactacttcaagaaaatcgagtgcttcgactccgtggaaatctccggcgtggaagatcggttcaacgcctccctgggcacataccacgatctgctgaaaattatcaaggacaaggacttcctggacaatgaggaaaacgaggacattctggaagatatcgtgctgaccctgacactgtttgaggacagagagatgatcgaggaacggctgaaaacctatgcccacctgttcgacgacaaagtgatgaagcagctgaagcggcggagatacaccggctggggcaggctgagccggaagctgatcaacggcatccgggacaagcagtccggcaagacaatcctggatttcctgaagtccgacggcttcgccaacagaaacttcatgcagctgatccacgacgacagcctgacctttaaagaggacatccagaaagcccaggtgtccggccagggcgatagcctgcacgagcacattgccaatctggccggcagccccgccattaagaagggcatcctgcagacagtgaaggtggtggacgagctcgtgaaagtgatgggccggcacaagcccgagaacatcgtgatcgaaatggccagagagaaccagaccacccagaagggacagaagaacagccgcgagagaatgaagcggatcgaagagggcatcaaagagctgggcagccagatcctgaaagaacaccccgtggaaaacacccagctgcagaacgagaagctgtacctgtactacctgcagaatgggcgggatatgtacgtggaccaggaactggacatcaaccggctgtccgactacgatgtggacgctatcgtgcctcagagctttctgaaggacgactccatcgacaacaaggtgctgaccagaagcgacaagaaccggggcaagagcgacaacgtgccctccgaagaggtcgtgaagaagatgaagaactactggcggcagctgctgaacgccaagctgattacccagagaaagttcgacaatctgaccaaggccgagagaggcggcctgagcgaactggataaggccggcttcatcaagagacagctggtggaaacccggcagatcacaaagcacgtggcacagatcctggactcccggatgaacactaagtacgacgagaatgacaagctgatccgggaagtgaaagtgatcaccctgaagtccaagctggtgtccgatttccggaaggatttccagttttacaaagtgcgcgagatcaacaactaccaccacgcccacgacgcctacctgaacgccgtcgtgggaaccgccctgatcaaaaagtaccctaagctggaaagcgagttcgtgtacggcgactacaaggtgtacgacgtgcggaagatgatcgccaagagcgagcaggaaatcggcaaggctaccgccaagtacttcttctacagcaacatcatgaactttttcaagaccgagattaccctggccaacggcgagatccggaagcggcctctgatcgagacaaacggcgaaaccggggagatcgtgtgggataagggccgggattttgccaccgtgcggaaagtgctgagcatgccccaagtgaatatcgtgaaaaagaccgaggtgcagacaggcggcttcagcaaagagtctatcctgcccaagaggaacagcgataagctgatcgccagaaagaaggactgggaccctaagaagtacggcggcttcgacagccccaccgtggcctattctgtgctggtggtggccaaagtggaaaagggcaagtccaagaaactgaagagtgtgaaagagctgctggggatcaccatcatggaaagaagcagcttcgagaagaatcccatcgactttctggaagccaagggctacaaagaagtgaaaaaggacctgatcatcaagctgcctaagtactccctgttcgagctggaaaacggccggaagagaatgctggcctctgccggcgaactgcagaagggaaacgaactggccctgccctccaaatatgtgaacttcctgtacctggccagccactatgagaagctgaagggctcccccgaggataatgagcagaaacagctgtttgtggaacagcacaagcactacctggacgagatcatcgagcagatcagcgagttctccaagagagtgatcctggccgacgctaatctggacaaagtgctgtccgcctacaacaagcaccgggataagcccatcagagagcaggccgagaatatcatccacctgtttaccctgaccaatctgggagcccctgccgccttcaagtactttgacaccaccatcgaccggaagaggtacaccagcaccaaagaggtgctggacgccaccctgatccaccagagcatcaccggcctgtacgagacacggatcgacctgtctcagctgggaggtgactctggaggatctagcggaggatcctctggcagcgagacaccaggaacaagcgagtcagcaacaccagagagcagtggcggcagcagcggcggcagcagcaccctaaatatagaagatgagtatcggctacatgagacctcaaaagagccagatgtttctctagggtccacatggctgtctgattttcctcaggcctgggcggaaaccgggggcatgggactggcagttcgccaagctcctctgatcatacctctgaaagcaacctctacccccgtgtccataaaacaataccccatgtcacaagaagccagactggggatcaagccccacatacagagactgttggaccagggaatactggtaccctgccagtccccctggaacacgcccctgctacccgttaagaaaccagggactaatgattataggcctgtccaggatctgagagaagtcaacaagcgggtggaagatatccaccccaccgtgcccaacccttacaacctcttgagcgggctcccaccgtcccaccagtggtacactgtgcttgatttaaaggatgcctttttctgcctgagactccaccccaccagtcagcctctcttcgcctttgagtggagagatccagagatgggaatctcaggacaattgacctggaccagactcccacagggtttcaaaaacagtcccaccctgtttaatgaggcactgcacagagacctagcagacttccggatccagcacccagacttgatcctgctacagtacgtggatgacttactgctggccgccacttctgagctagactgccaacaaggtactcgggccctgttacaaaccctagggaacctcgggtatcgggcctcggccaagaaagcccaaatttgccagaaacaggtcaagtatctggggtatcttctaaaagagggtcagagatggctgactgaggccagaaaagagactgtgatggggcagcctactcctaagacccctcgacaactaagggagttcctagggaaggcaggcttctgtcgcctcttcatccctgggtttgcagaaatggcagcccccctgtaccctctcaccaaaccggggactctgtttaattggggcccagaccaacaaaaggcctatcaagaaatcaagcaagctcttctaactgccccagccctggggttgccagatttgactaagccctttgaactctttgtcgacgagaagcagggctacgccaaaggtgtcctaacgcaaaaactgggaccttggcgtcggccggtggcctacctgtccaaaaagctagacccagtagcagctgggtggcccccttgcctacggatggtagcagccattgccgtactgacaaaggatgcaggcaagctaaccatgggacagccactagtcattctggccccccatgcagtagaggcactagtcaaacaaccccccgaccgctggctttccaacgcccggatgactcactatcaggccttgcttttggacacggaccgggtccagttcggaccggtggtagccctgaacccggctacgctgctcccactgcctgaggaagggctgcaacacaactgccttgatatcctggccgaagcccacgga

SEQ ID NO: 40 - RNA, 5712 nt, synthetic construct
  misc_feature 1..5712: note = Description of Artificial Sequence: Synthetic polynucleotide
  source 1..5712: mol_type = other RNA
gacaagaagtacagcatcggcctggacatcggcaccaactctgtgggctgggccgtgatcaccgacgagtacaaggtgcccagcaagaaattcaaggtgctgggcaacaccgaccggcacagcatcaagaagaacctgatcggagccctgctgttcgacagcggcgaaacagccgaggccacccggctgaagagaaccgccagaagaagatacaccagacggaagaaccggatctgctatctgcaagagatcttcagcaacgagatggccaaggtggacgacagcttcttccacagactggaagagtccttcctggtggaagaggataagaagcacgagcggcaccccatcttcggcaacatcgtggacgaggtggcctaccacgagaagtaccccaccatctaccacctgagaaagaaactggtggacagcaccgacaaggccgacctgcggctgatctatctggccctggcccacatgatcaagttccggggccacttcctgatcgagggcgacctgaaccccgacaacagcgacgtggacaagctgttcatccagctggtgcagacctacaaccagctgttcgaggaaaaccccatcaacgccagcggcgtggacgccaaggccatcctgtctgccagactgagcaagagcagacggctggaaaatctgatcgcccagctgcccggcgagaagaagaatggcctgttcggaaacctgattgccctgagcctgggcctgacccccaacttcaagagcaacttcgacctggccgaggatgccaaactgcagctgagcaaggacacctacgacgacgacctggacaacctgctggcccagatcggcgaccagtacgccgacctgtttctggccgccaagaacctgtccgacgccatcctgctgagcgacatcctgagagtgaacaccgagatcaccaaggcccccctgagcgcctctatgatcaagagatacgacgagcaccaccaggacctgaccctgctgaaagctctcgtgcggcagcagctgcctgagaagtacaaagagattttcttcgaccagagcaagaacggctacgccggctacattgacggcggagccagccaggaagagttctacaagttcatcaagcccatcctggaaaagatggacggcaccgaggaactgctcgtgaagctgaacagagaggacctgctgcggaagcagcggaccttcgacaacggcagcatcccccaccagatccacctgggagagctgcacgccattctgcggcggcaggaagatttttacccattcctgaaggacaaccgggaaaagatcgagaagatcctgaccttccgcatcccctactacgtgggccctctggccaggggaaacagcagattcgcctggatgaccagaaagagcgaggaaaccatcaccccctggaacttcgaggaagtggtggacaagggcgcttccgcccagagcttcatcgagcggatgaccaacttcgataagaacctgcccaacgagaaggtgctgcccaagcacagcctgctgtacgagtacttcaccgtgtataacgagctgaccaaagtgaaatacgtgaccgagggaatgagaaagcccgccttcctgagcggcgagcagaaaaaggccatcgtggacctgctgttcaagaccaaccggaaagtgaccgtgaagcagctgaaagaggactacttcaagaaaatcgagtgcttcgactccgtggaaatctccggcgtggaagatcggttcaacgcctccctgggcacataccacgatctgctgaaaattatcaaggacaaggacttcctggacaatgaggaaaacgaggacattctggaagatatcgtgctgaccctgacactgtttgaggacagagagatgatcgaggaacggctgaaaacctatgcccacctgttcgacgacaaagtgatgaagcagctgaagcggcggagatacaccggctggggcaggctgagccggaagctgatcaacggcatccgggacaagcagtccggcaagacaatcctggatttcctgaagtccgacggcttcgccaacagaaacttcatgcagctgatccacgacgacagcctgacctttaaagaggacatccagaaagcccaggtgtccggccagggcgatagcctgcacgagcacattgccaatctggccggcagccccgccattaagaagggcatcctgcagacagtgaaggtggtggacgagctcgtgaaagtgatgggccggcacaagcccgagaacatcgtgatcgaaatggccagagagaaccagaccacccagaagggacagaagaacagccgcgagagaatgaagcggatcgaagagggcatcaaagagctgggcagccagatcctgaaagaacaccccgtggaaaacacccagctgcagaacgagaagctgtacctgtactacctgcagaatgggcgggatatgtacgtggaccaggaactggacatcaaccggctgtccgactacgatgtggacgctatcgtgcctcagagctttctgaaggacgactccatcgacaacaaggtgctgaccagaagcgacaagaaccggggcaagagcgacaacgtgccctccgaagaggtcgtgaagaagatgaagaactactggcggcagctgctgaacgccaagctgattacccagagaaagttcgacaatctgaccaaggccgagagaggcggcctgagcgaactggataaggccggcttcatcaagagacagctggtggaaacccggcagatcacaaagcacgtggcacagatcctggactcccggatgaacactaagtacgacgagaatgacaagctgatccgggaagtgaaagtgatcaccctgaagtccaagctggtgtccgatttccggaaggatttccagttttacaaagtgcgcgagatcaacaactaccaccacgcccacgacgcctacctgaacgccgtcgtgggaaccgccctgatcaaaaagtaccctaagctggaaagcgagttcgtgtacggcgactacaaggtgtacgacgtgcggaagatgatcgccaagagcgagcaggaaatcggcaaggctaccgccaagtacttcttctacagcaacatcatgaactttttcaagaccgagattaccctggccaacggcgagatccggaagcggcctctgatcgagacaaacggcgaaaccggggagatcgtgtgggataagggccgggattttgccaccgtgcggaaagtgctgagcatgccccaagtgaatatcgtgaaaaagaccgaggtgcagacaggcggcttcagcaaagagtctatcctgcccaagaggaacagcgataagctgatcgccagaaagaaggactgggaccctaagaagtacggcggcttcgacagccccaccgtggcctattctgtgctggtggtggccaaagtggaaaagggcaagtccaagaaactgaagagtgtgaaagagctgctggggatcaccatcatggaaagaagcagcttcgagaagaatcccatcgactttctggaagccaagggctacaaagaagtgaaaaaggacctgatcatcaagctgcctaagtactccctgttcgagctggaaaacggccggaagagaatgctggcctctgccggcgaactgcagaagggaaacgaactggccctgccctccaaatatgtgaacttcctgtacctggccagccactatgagaagctgaagggctcccccgaggataatgagcagaaacagctgtttgtggaacagcacaagcactacctggacgagatcatcgagcagatcagcgagttctccaagagagtgatcctggccgacgctaatctggacaaagtgctgtccgcctacaacaagcaccgggataagcccatcagagagcaggccgagaatatcatccacctgtttaccctgaccaatctgggagcccctgccgccttcaagtactttgacaccaccatcgaccggaagaggtacaccagcaccaaagaggtgctggacgccaccctgatccaccagagcatcaccggcctgtacgagacacggatcgacctgtctcagctgggaggtgactctggaggatctagcggaggatcctctggcagcgagacaccaggaacaagcgagtcagcaacaccagagagcagtggcggcagcagcggcggcagcagcaccctaaatatagaagatgagtatcggctacatgagacctcaaaagagccagatgtttctctagggtccacatggctgtctgattttcctcaggcctgggcggaaaccgggggcatgggactggcagttcgccaagctcctctgatcatacctctgaaagcaacctctacccccgtgtccataaaacaataccccatgtcacaagaagccagactggggatcaagccccacatacagagactgttggaccagggaatactggtaccctgccagtccccctggaacacgcccctgctacccgttaagaaaccagggactaatgattataggcctgtccaggatctgagagaagtcaacaagcgggtggaagatatccaccccaccgtgcccaacccttacaacctcttgagcgggctcccaccgtcccaccagtggtacactgtgcttgatttaaaggatgcctttttctgcctgagactccaccccaccagtcagcctctcttcgcctttgagtggagagatccagagatgggaatctcaggacaattgacctggaccagactcccacagggtttcaaaaacagtcccaccctgtttaatgaggcactgcacagagacctagcagacttccggatccagcacccagacttgatcctgctacagtacgtggatgacttactgctggccgccacttctgagctagactgccaacaaggtactcgggccctgttacaaaccctagggaacctcgggtatcgggcctcggccaagaaagcccaaatttgccagaaacaggtcaagtatctggggtatcttctaaaagagggtcagagatggctgactgaggccagaaaagagactgtgatggggcagcctactcctaagacccctcgacaactaagggagttcctagggaaggcaggcttctgtcgcctcttcatccctgggtttgcagaaatggcagcccccctgtaccctctcaccaaaccggggactctgtttaattggggcccagaccaacaaaaggcctatcaagaaatcaagcaagctcttctaactgccccagccctggggttgccagatttgactaagccctttgaactctttgtcgacgagaagcagggctacgccaaaggtgtcctaacgcaaaaactgggaccttggcgtcggccggtggcctacctgtccaaaaagctagacccagtagcagctgggtggcccccttgcctacggatggtagcagccattgccgtactgacaaaggatgcaggcaagctaaccatgggacagccactagtcattctggccccccatgcagtagaggcactagtcaaacaaccccccgaccgctggctttccaacgcccggatgactcactatcaggccttgcttttggacacggaccgggtccagttcggaccggtggtagccctgaacccggctacgctgctcccactgcctgaggaagggctgcaacacaactgccttgatatcctggccgaagcccacgga

SEQ ID NO: 41 - DNA, 1512 bp, synthetic construct
  misc_feature 1..1512: note = Description of Artificial Sequence: Synthetic polynucleotide
  source 1..1512: mol_type = other DNA
accctaaatatagaagatgagtatcggctacatgagacctcaaaagagccagatgtttctctagggtccacatggctgtctgattttcctcaggcctgggcggaaaccgggggcatgggactggcagttcgccaagctcctctgatcatacctctgaaagcaacctctacccccgtgtccataaaacaataccccatgtcacaagaagccagactggggatcaagccccacatacagagactgttggaccagggaatactggtaccctgccagtccccctggaacacgcccctgctacccgttaagaaaccagggactaatgattataggcctgtccaggatctgagagaagtcaacaagcgggtggaagatatccaccccaccgtgcccaacccttacaacctcttgagcgggctcccaccgtcccaccagtggtacactgtgcttgatttaaaggatgcctttttctgcctgagactccaccccaccagtcagcctctcttcgcctttgagtggagagatccagagatgggaatctcaggacaattgacctggaccagactcccacagggtttcaaaaacagtcccaccctgtttaatgaggcactgcacagagacctagcagacttccggatccagcacccagacttgatcctgctacagtacgtggatgacttactgctggccgccacttctgagctagactgccaacaaggtactcgggccctgttacaaaccctagggaacctcgggtatcgggcctcggccaagaaagcccaaatttgccagaaacaggtcaagtatctggggtatcttctaaaagagggtcagagatggctgactgaggccagaaaagagactgtgatggggcagcctactcctaagacccctcgacaactaagggagttcctagggaaggcaggcttctgtcgcctcttcatccctgggtttgcagaaatggcagcccccctgtaccctctcaccaaaccggggactctgtttaattggggcccagaccaacaaaaggcctatcaagaaatcaagcaagctcttctaactgccccagccctggggttgccagatttgactaagccctttgaactctttgtcgacgagaagcagggctacgccaaaggtgtcctaacgcaaaaactgggaccttggcgtcggccggtggcctacctgtccaaaaagctagacccagtagcagctgggtggcccccttgcctacggatggtagcagccattgccgtactgacaaaggatgcaggcaagctaaccatgggacagccactagtcattctggccccccatgcagtagaggcactagtcaaacaaccccccgaccgctggctttccaacgcccggatgactcactatcaggccttgcttttggacacggaccgggtccagttcggaccggtggtagccctgaacccggctacgctgctcccactgcctgaggaagggctgcaacacaactgccttgatatcctggccgaagcccacgga

SEQ ID NO: 42 - RNA, 1512 nt, synthetic construct
  misc_feature 1..1512: note = Description of Artificial Sequence: Synthetic polynucleotide
  source 1..1512: mol_type = other RNA
accctaaatatagaagatgagtatcggctacatgagacctcaaaagagccagatgtttctctagggtccacatggctgtctgattttcctcaggcctgggcggaaaccgggggcatgggactggcagttcgccaagctcctctgatcatacctctgaaagcaacctctacccccgtgtccataaaacaataccccatgtcacaagaagccagactggggatcaagccccacatacagagactgttggaccagggaatactggtaccctgccagtccccctggaacacgcccctgctacccgttaagaaaccagggactaatgattataggcctgtccaggatctgagagaagtcaacaagcgggtggaagatatccaccccaccgtgcccaacccttacaacctcttgagcgggctcccaccgtcccaccagtggtacactgtgcttgatttaaaggatgcctttttctgcctgagactccaccccaccagtcagcctctcttcgcctttgagtggagagatccagagatgggaatctcaggacaattgacctggaccagactcccacagggtttcaaaaacagtcccaccctgtttaatgaggcactgcacagagacctagcagacttccggatccagcacccagacttgatcctgctacagtacgtggatgacttactgctggccgccacttctgagctagactgccaacaaggtactcgggccctgttacaaaccctagggaacctcgggtatcgggcctcggccaagaaagcccaaatttgccagaaacaggtcaagtatctggggtatcttctaaaagagggtcagagatggctgactgaggccagaaaagagactgtgatggggcagcctactcctaagacccctcgacaactaagggagttcctagggaaggcaggcttctgtcgcctcttcatccctgggtttgcagaaatggcagcccccctgtaccctctcaccaaaccggggactctgtttaattggggcccagaccaacaaaaggcctatcaagaaatcaagcaagctcttctaactgccccagccctggggttgccagatttgactaagccctttgaactctttgtcgacgagaagcagggctacgccaaaggtgtcctaacgcaaaaactgggaccttggcgtcggccggtggcctacctgtccaaaaagctagacccagtagcagctgggtggcccccttgcctacggatggtagcagccattgccgtactgacaaaggatgcaggcaagctaaccatgggacagccactagtcattctggccccccatgcagtagaggcactagtcaaacaaccccccgaccgctggctttccaacgcccggatgactcactatcaggccttgcttttggacacggaccgggtccagttcggaccggtggtagccctgaacccggctacgctgctcccactgcctgaggaagggctgcaacacaactgccttgatatcctggccgaagcccacgga

SEQ ID NO: 43 - protein, 2117 aa, synthetic construct
  REGION 1..2117: note = Description of Artificial Sequence: Synthetic polypeptide
MKRTADGSEFESPKKKRKVDKKYSIGLDIGTNSVGWAVITDEYKVPSKKFKVLGNTDRHSIKKNLIGALLFDSGETAEATRLKRTARRRYTRRKNRICYLQEIFSNEMAKVDDSFFHRLEESFLVEEDKKHERHPIFGNIVDEVAYHEKYPTIYHLRKKLVDSTDKADLRLIYLALAHMIKFRGHFLIEGDLNPDNSDVDKLFIQLVQTYNQLFEENPINASGVDAKAILSARLSKSRRLENLIAQLPGEKKNGLFGNLIALSLGLTPNFKSNFDLAEDAKLQLSKDTYDDDLDNLLAQIGDQYADLFLAAKNLSDAILLSDILRVNTEITKAPLSASMIKRYDEHHQDLTLLKALVRQQLPEKYKEIFFDQSKNGYAGYIDGGASQEEFYKFIKPILEKMDGTEELLVKLNREDLLRKQRTFDNGSIPHQIHLGELHAILRRQEDFYPFLKDNREKIEKILTFRIPYYVGPLARGNSRFAWMTRKSEETITPWNFEEVVDKGASAQSFIERMTNFDKNLPNEKVLPKHSLLYEYFTVYNELTKVKYVTEGMRKPAFLSGEQKKAIVDLLFKTNRKVTVKQLKEDYFKKIECFDSVEISGVEDRFNASLGTYHDLLKIIKDKDFLDNEENEDILEDIVLTLTLFEDREMIEERLKTYAHLFDDKVMKQLKRRRYTGWGRLSRKLINGIRDKQSGKTILDFLKSDGFANRNFMQLIHDDSLTFKEDIQKAQVSGQGDSLHEHIANLAGSPAIKKGILQTVKVVDELVKVMGRHKPENIVIEMARENQTTQKGQKNSRERMKRIEEGIKELGSQILKEHPVENTQLQNEKLYLYYLQNGRDMYVDQELDINRLSDYDVDAIVPQSFLKDDSIDNKVLTRSDKNRGKSDNVPSEEVVKKMKNYWRQLLNAKLITQRKFDNLTKAERGGLSELDKAGFIKRQLVETRQITKHVAQILDSRMNTKYDENDKLIREVKVITLKSKLVSDFRKDFQFYKVREINNYHHAHDAYLNAVVGTALIKKYPKLESEFVYGDYKVYDVRKMIAKSEQEIGKATAKYFFYSNIMNFFKTEITLANGEIRKRPLIETNGETGEIVWDKGRDFATVRKVLSMPQVNIVKKTEVQTGGFSKESILPKRNSDKLIARKKDWDPKKYGGFDSPTVAYSVLVVAKVEKGKSKKLKSVKELLGITIMERSSFEKNPIDFLEAKGYKEVKKDLIIKLPKYSLFELENGRKRMLASAGELQKGNELALPSKYVNFLYLASHYEKLKGSPEDNEQKQLFVEQHKHYLDEIIEQISEFSKRVILADANLDKVLSAYNKHRDKPIREQAENIIHLFTLTNLGAPAAFKYFDTTIDRKRYTSTKEVLDATLIHQSITGLYETRIDLSQLGGDSGGSSGGSSGSETPGTSESATPESSGGSSGGSSTLNIEDEYRLHETSKEPDVSLGSTWLSDFPQAWAETGGMGLAVRQAPLIIPLKATSTPVSIKQYPMSQEARLGIKPHIQRLLDQGILVPCQSPWNTPLLPVKKPGTNDYRPVQDLREVNKRVEDIHPTVPNPYNLLSGLPPSHQWYTVLDLKDAFFCLRLHPTSQPLFAFEWRDPEMGISGQLTWTRLPQGFKNSPTLFNEALHRDLADFRIQHPDLILLQYVDDLLLAATSELDCQQGTRALLQTLGNLGYRASAKKAQICQKQVKYLGYLLKEGQRWLTEARKETVMGQPTPKTPRQLREFLGKAGFCRLFIPGFAEMAAPLYPLTKPGTLFNWGPDQQKAYQEIKQALLTAPALGLPDLTKPFELFVDEKQGYAKGVLTQKLGPWRRPVAYLSKKLDPVAAGWPPCLRMVAAIAVLTKDAGKLTMGQPLVILAPHAVEALVKQPPDRWLSNARMTHYQALLLDTDRVQFGPVVALNPATLLPLPEEGLQHNCLDILAEAHGTRPDLTDQPLPDADHTWYTNGSSLLQEGQRKAGAAVTTETEVIWAKALPAGTSAQRAELIALTQALKMAEGKKLNVYTDSRYAFATAHIHGEIYRRRGWLTSEGKEIKNKDEILALLKALFLPKRLSIIHCPGHQKGHSAEARGNRMADQAARKAAITETPDTSTLLIENSSPSGGSKRTADGSEFEPKKKRKV

SEQ ID NO: 44 - protein, 2077 aa, synthetic construct
  REGION 1..2077: note = Description of Artificial Sequence: Synthetic polypeptide
DKKYSIGLDIGTNSVGWAVITDEYKVPSKKFKVLGNTDRHSIKKNLIGALLFDSGETAEATRLKRTARRRYTRRKNRICYLQEIFSNEMAKVDDSFFHRLEESFLVEEDKKHERHPIFGNIVDEVAYHEKYPTIYHLRKKLVDSTDKADLRLIYLALAHMIKFRGHFLIEGDLNPDNSDVDKLFIQLVQTYNQLFEENPINASGVDAKAILSARLSKSRRLENLIAQLPGEKKNGLFGNLIALSLGLTPNFKSNFDLAEDAKLQLSKDTYDDDLDNLLAQIGDQYADLFLAAKNLSDAILLSDILRVNTEITKAPLSASMIKRYDEHHQDLTLLKALVRQQLPEKYKEIFFDQSKNGYAGYIDGGASQEEFYKFIKPILEKMDGTEELLVKLNREDLLRKQRTFDNGSIPHQIHLGELHAILRRQEDFYPFLKDNREKIEKILTFRIPYYVGPLARGNSRFAWMTRKSEETITPWNFEEVVDKGASAQSFIERMTNFDKNLPNEKVLPKHSLLYEYFTVYNELTKVKYVTEGMRKPAFLSGEQKKAIVDLLFKTNRKVTVKQLKEDYFKKIECFDSVEISGVEDRFNASLGTYHDLLKIIKDKDFLDNEENEDILEDIVLTLTLFEDREMIEERLKTYAHLFDDKVMKQLKRRRYTGWGRLSRKLINGIRDKQSGKTILDFLKSDGFANRNFMQLIHDDSLTFKEDIQKAQVSGQGDSLHEHIANLAGSPAIKKGILQTVKVVDELVKVMGRHKPENIVIEMARENQTTQKGQKNSRERMKRIEEGIKELGSQILKEHPVENTQLQNEKLYLYYLQNGRDMYVDQELDINRLSDYDVDAIVPQSFLKDDSIDNKVLTRSDKNRGKSDNVPSEEVVKKMKNYWRQLLNAKLITQRKFDNLTKAERGGLSELDKAGFIKRQLVETRQITKHVAQILDSRMNTKYDENDKLIREVKVITLKSKLVSDFRKDFQFYKVREINNYHHAHDAYLNAVVGTALIKKYPKLESEFVYGDYKVYDVRKMIAKSEQEIGKATAKYFFYSNIMNFFKTEITLANGEIRKRPLIETNGETGEIVWDKGRDFATVRKVLSMPQVNIVKKTEVQTGGFSKESILPKRNSDKLIARKKDWDPKKYGGFDSPTVAYSVLVVAKVEKGKSKKLKSVKELLGITIMERSSFEKNPIDFLEAKGYKEVKKDLIIKLPKYSLFELENGRKRMLASAGELQKGNELALPSKYVNFLYLASHYEKLKGSPEDNEQKQLFVEQHKHYLDEIIEQISEFSKRVILADANLDKVLSAYNKHRDKPIREQAENIIHLFTLTNLGAPAAFKYFDTTIDRKRYTSTKEVLDATLIHQSITGLYETRIDLSQLGGDSGGSSGGSSGSETPGTSESATPESSGGSSGGSSTLNIEDEYRLHETSKEPDVSLGSTWLSDFPQAWAETGGMGLAVRQAPLIIPLKATSTPVSIKQYPMSQEARLGIKPHIQRLLDQGILVPCQSPWNTPLLPVKKPGTNDYRPVQDLREVNKRVEDIHPTVPNPYNLLSGLPPSHQWYTVLDLKDAFFCLRLHPTSQPLFAFEWRDPEMGISGQLTWTRLPQGFKNSPTLFNEALHRDLADFRIQHPDLILLQYVDDLLLAATSELDCQQGTRALLQTLGNLGYRASAKKAQICQKQVKYLGYLLKEGQRWLTEARKETVMGQPTPKTPRQLREFLGKAGFCRLFIPGFAEMAAPLYPLTKPGTLFNWGPDQQKAYQEIKQALLTAPALGLPDLTKPFELFVDEKQGYAKGVLTQKLGPWRRPVAYLSKKLDPVAAGWPPCLRMVAAIAVLTKDAGKLTMGQPLVILAPHAVEALVKQPPDRWLSNARMTHYQALLLDTDRVQFGPVVALNPATLLPLPEEGLQHNCLDILAEAHGTRPDLTDQPLPDADHTWYTNGSSLLQEGQRKAGAAVTTETEVIWAKALPAGTSAQRAELIALTQALKMAEGKKLNVYTDSRYAFATAHIHGEIYRRRGWLTSEGKEIKNKDEILALLKALFLPKRLSIIHCPGHQKGHSAEARGNRMADQAARKAAITETPDTSTLLIENSSP

SEQ ID NO: 45 - protein, 677 aa, synthetic construct
  REGION 1..677: note = Description of Artificial Sequence: Synthetic polypeptide
TLNIEDEYRLHETSKEPDVSLGSTWLSDFPQAWAETGGMGLAVRQAPLIIPLKATSTPVSIKQYPMSQEARLGIKPHIQRLLDQGILVPCQSPWNTPLLPVKKPGTNDYRPVQDLREVNKRVEDIHPTVPNPYNLLSGLPPSHQWYTVLDLKDAFFCLRLHPTSQPLFAFEWRDPEMGISGQLTWTRLPQGFKNSPTLFNEALHRDLADFRIQHPDLILLQYVDDLLLAATSELDCQQGTRALLQTLGNLGYRASAKKAQICQKQVKYLGYLLKEGQRWLTEARKETVMGQPTPKTPRQLREFLGKAGFCRLFIPGFAEMAAPLYPLTKPGTLFNWGPDQQKAYQEIKQALLTAPALGLPDLTKPFELFVDEKQGYAKGVLTQKLGPWRRPVAYLSKKLDPVAAGWPPCLRMVAAIAVLTKDAGKLTMGQPLVILAPHAVEALVKQPPDRWLSNARMTHYQALLLDTDRVQFGPVVALNPATLLPLPEEGLQHNCLDILAEAHGTRPDLTDQPLPDADHTWYTNGSSLLQEGQRKAGAAVTTETEVIWAKALPAGTSAQRAELIALTQALKMAEGKKLNVYTDSRYAFATAHIHGEIYRRRGWLTSEGKEIKNKDEILALLKALFLPKRLSIIHCPGHQKGHSAEARGNRMADQAARKAAITETPDTSTLLIENSSP

SEQ ID NO: 46 - DNA, 6351 bp, synthetic construct
  misc_feature 1..6351: note = Description of Artificial Sequence: Synthetic polynucleotide
  source 1..6351: mol_type = other DNA
atgaaacgtacagccgacggaagcgagttcgagtcaccaaagaagaagcggaaagtcgacaagaagtacagcatcggcctggacatcggcaccaactctgtgggctgggccgtgatcaccgacgagtacaaggtgcccagcaagaaattcaaggtgctgggcaacaccgaccggcacagcatcaagaagaacctgatcggagccctgctgttcgacagcggcgaaacagccgaggccacccggctgaagagaaccgccagaagaagatacaccagacggaagaaccggatctgctatctgcaagagatcttcagcaacgagatggccaaggtggacgacagcttcttccacagactggaagagtccttcctggtggaagaggataagaagcacgagcggcaccccatcttcggcaacatcgtggacgaggtggcctaccacgagaagtaccccaccatctaccacctgagaaagaaactggtggacagcaccgacaaggccgacctgcggctgatctatctggccctggcccacatgatcaagttccggggccacttcctgatcgagggcgacctgaaccccgacaacagcgacgtggacaagctgttcatccagctggtgcagacctacaaccagctgttcgaggaaaaccccatcaacgccagcggcgtggacgccaaggccatcctgtctgccagactgagcaagagcagacggctggaaaatctgatcgcccagctgcccggcgagaagaagaatggcctgttcggaaacctgattgccctgagcctgggcctgacccccaacttcaagagcaacttcgacctggccgaggatgccaaactgcagctgagcaaggacacctacgacgacgacctggacaacctgctggcccagatcggcgaccagtacgccgacctgtttctggccgccaagaacctgtccgacgccatcctgctgagcgacatcctgagagtgaacaccgagatcaccaaggcccccctgagcgcctctatgatcaagagatacgacgagcaccaccaggacctgaccctgctgaaagctctcgtgcggcagcagctgcctgagaagtacaaagagattttcttcgaccagagcaagaacggctacgccggctacattgacggcggagccagccaggaagagttctacaagttcatcaagcccatcctggaaaagatggacggcaccgaggaactgctcgtgaagctgaacagagaggacctgctgcggaagcagcggaccttcgacaacggcagcatcccccaccagatccacctgggagagctgcacgccattctgcggcggcaggaagatttttacccattcctgaaggacaaccgggaaaagatcgagaagatcctgaccttccgcatcccctactacgtgggccctctggccaggggaaacagcagattcgcctggatgaccagaaagagcgaggaaaccatcaccccctggaacttcgaggaagtggtggacaagggcgcttccgcccagagcttcatcgagcggatgaccaacttcgataagaacctgcccaacgagaaggtgctgcccaagcacagcctgctgtacgagtacttcaccgtgtataacgagctgaccaaagtgaaatacgtgaccgagggaatgagaaagcccgccttcctgagcggcgagcagaaaaaggccatcgtggacctgctgttcaagaccaaccggaaagtgaccgtgaagcagctgaaagaggactacttcaagaaaatcgagtgcttcgactccgtggaaatctccggcgtggaagatcggttcaacgcctccctgggcacataccacgatctgctgaaaattatcaaggacaaggacttcctggacaatgaggaaaacgaggacattctggaagatatcgtgctgaccctgacactgtttgaggacagagagatgatcgaggaacggctgaaaacctatgcccacctgttcgacgacaaagtgatgaagcagctgaagcggcggagatacaccggctggggcaggctgagccggaagctgatcaacggcatccgggacaagcagtccggcaagacaatcctggatttcctgaagtccgacggcttcgccaacagaaacttcatgcagctgatccacgacgacagcctgacctttaaagaggacatccagaaagcccaggtgtccggccagggcgatagcctgcacgagcacattgccaatctggccggcagccccgccattaagaagggcatcctgcagacagtgaaggtggtggacgagctcgtgaaagtgatgggccggcacaagcccgagaacatcgtgatcgaaatggccagagagaaccagaccacccagaagggacagaagaacagccgcgagagaatgaagcggatcgaagagggcatcaaagagctgggcagccagatcctgaaagaacaccccgtggaaaacacccagctgcagaacgagaagctgtacctgtactacctgcagaatgggcgggatatgtacgtggaccaggaactggacatcaaccggctgtccgactacgatgtggacgctatcgtgcctcagagctttctgaaggacgactccatcgacaacaaggtgctgaccagaagcgacaagaaccggggcaagagcgacaacgtgccctccgaagaggtcgtgaagaagatgaagaactactggcggcagctgctgaacgccaagctgattacccagagaaagttcgacaatctgaccaaggccgagagaggcggcctgagcgaactggataaggccggcttcatcaagagacagctggtggaaacccggcagatcacaaagcacgtggcacagatcctggactcccggatgaacactaagtacgacgagaatgacaagctgatccgggaagtgaaagtgatcaccctgaagtccaagctggtgtccgatttccggaaggatttccagttttacaaagtgcgcgagatcaacaactaccaccacgcccacgacgcctacctgaacgccgtcgtgggaaccgccctgatcaaaaagtaccctaagctggaaagcgagttcgtgtacggcgactacaaggtgtacgacgtgcggaagatgatcgccaagagcgagcaggaaatcggcaaggctaccgccaagtacttcttctacagcaacatcatgaactttttcaagaccgagattaccctggccaacggcgagatccggaagcggcctctgatcgagacaaacggcgaaaccggggagatcgtgtgggataagggccgggattttgccaccgtgcggaaagtgctgagcatgccccaagtgaatatcgtgaaaaagaccgaggtgcagacaggcggcttcagcaaagagtctatcctgcccaagaggaacagcgataagctgatcgccagaaagaaggactgggaccctaagaagtacggcggcttcgacagccccaccgtggcctattctgtgctggtggtggccaaagtggaaaagggcaagtccaagaaactgaagagtgtgaaagagctgctggggatcaccatcatggaaagaagcagcttcgagaagaatcccatcgactttctggaagccaagggctacaaagaagtgaaaaaggacctgatcatcaagctgcctaagtactccctgttcgagctggaaaacggccggaagagaatgctggcctctgccggcgaactgcagaagggaaacgaactggccctgccctccaaatatgtgaacttcctgtacctggccagccactatgagaagctgaagggctcccccgaggataatgagcagaaacagctgtttgtggaacagcacaagcactacctggacgagatcatcgagcagatcagcgagttctccaagagagtgatcctggccgacgctaatctggacaaagtgctgtccgcctacaacaagcaccgggataagcccatcagagagcaggccgagaatatcatccacctgtttaccctgaccaatctgggagcccctgccgccttcaagtactttgacaccaccatcgaccggaagaggtacaccagcaccaaagaggtgctggacgccaccctgatccaccagagcatcaccggcctgtacgagacacggatcgacctgtctcagctgggaggtgactctggaggatctagcggaggatcctctggcagcgagacaccaggaacaagcgagtcagcaacaccagagagcagtggcggcagcagcggcggcagcagcaccctaaatatagaagatgagtatcggctacatgagacctcaaaagagccagatgtttctctagggtccacatggctgtctgattttcctcaggcctgggcggaaaccgggggcatgggactggcagttcgccaagctcctctgatcatacctctgaaagcaacctctacccccgtgtccataaaacaataccccatgtcacaagaagccagactggggatcaagccccacatacagagactgttggaccagggaatactggtaccctgccagtccccctggaacacgcccctgctacccgttaagaaaccagggactaatgattataggcctgtccaggatctgagagaagtcaacaagcgggtggaagatatccaccccaccgtgcccaacccttacaacctcttgagcgggctcccaccgtcccaccagtggtacactgtgcttgatttaaaggatgcctttttctgcctgagactccaccccaccagtcagcctctcttcgcctttgagtggagagatccagagatgggaatctcaggacaattgacctggaccagactcccacagggtttcaaaaacagtcccaccctgtttaatgaggcactgcacagagacctagcagacttccggatccagcacccagacttgatcctgctacagtacgtggatgacttactgctggccgccacttctgagctagactgccaacaaggtactcgggccctgttacaaaccctagggaacctcgggtatcgggcctcggccaagaaagcccaaatttgccagaaacaggtcaagtatctggggtatcttctaaaagagggtcagagatggctgactgaggccagaaaagagactgtgatggggcagcctactcctaagacccctcgacaactaagggagttcctagggaaggcaggcttctgtcgcctcttcatccctgggtttgcagaaatggcagcccccctgtaccctctcaccaaaccggggactctgtttaattggggcccagaccaacaaaaggcctatcaagaaatcaagcaagctcttctaactgccccagccctggggttgccagatttgactaagccctttgaactctttgtcgacgagaagcagggctacgccaaaggtgtcctaacgcaaaaactgggaccttggcgtcggccggtggcctacctgtccaaaaagctagacccagtagcagctgggtggcccccttgcctacggatggtagcagccattgccgtactgacaaaggatgcaggcaagctaaccatgggacagccactagtcattctggccccccatgcagtagaggcactagtcaaacaaccccccgaccgctggctttccaacgcccggatgactcactatcaggccttgcttttggacacggaccgggtccagttcggaccggtggtagccctgaacccggctacgctgctcccactgcctgaggaagggctgcaacacaactgccttgatatcctggccgaagcccacggaacccgacccgacctaacggaccagccgctcccagacgccgaccacacctggtacacgaatggaagcagtctcttacaagagggacagcgtaaggcgggagctgcggtgaccaccgagaccgaggtaatctgggctaaagccctgccagccgggacatccgctcagcgggctgaactgatagcactcacccaggccctaaagatggcagaaggtaagaagctaaatgtttatactgatagccgttatgcttttgctactgcccatatccatggagaaatatacagaaggcgtgggtggctcacatcagaaggcaaagagatcaaaaataaagacgagatcttggccctactaaaagccctctttctgcccaaaagacttagcataatccattgtccaggacatcaaaagggacacagcgccgaggctagaggcaaccggatggctgaccaagcggcccgaaaggcagccatcacagagactccagacacctctaccctcctcatagaaaattcatcaccctctggcggctcaaaaagaaccgccgacggcagcgaattcgagcccaagaagaagaggaaagtc

SEQ ID NO: 47 - RNA, 6351 nt, synthetic construct
  misc_feature 1..6351: note = Description of Artificial Sequence: Synthetic polynucleotide
  source 1..6351: mol_type = other RNA
atgaaacgtacagccgacggaagcgagttcgagtcaccaaagaagaagcggaaagtcgacaagaagtacagcatcggcctggacatcggcaccaactctgtgggctgggccgtgatcaccgacgagtacaaggtgcccagcaagaaattcaaggtgctgggcaacaccgaccggcacagcatcaagaagaacctgatcggagccctgctgttcgacagcggcgaaacagccgaggccacccggctgaagagaaccgccagaagaagatacaccagacggaagaaccggatctgctatctgcaagagatcttcagcaacgagatggccaaggtggacgacagcttcttccacagactggaagagtccttcctggtggaagaggataagaagcacgagcggcaccccatcttcggcaacatcgtggacgaggtggcctaccacgagaagtaccccaccatctaccacctgagaaagaaactggtggacagcaccgacaaggccgacctgcggctgatctatctggccctggcccacatgatcaagttccggggccacttcctgatcgagggcgacctgaaccccgacaacagcgacgtggacaagctgttcatccagctggtgcagacctacaaccagctgttcgaggaaaaccccatcaacgccagcggcgtggacgccaaggccatcctgtctgccagactgagcaagagcagacggctggaaaatctgatcgcccagctgcccggcgagaagaagaatggcctgttcggaaacctgattgccctgagcctgggcctgacccccaacttcaagagcaacttcgacctggccgaggatgccaaactgcagctgagcaaggacacctacgacgacgacctggacaacctgctggcccagatcggcgaccagtacgccgacctgtttctggccgccaagaacctgtccgacgccatcctgctgagcgacatcctgagagtgaacaccgagatcaccaaggcccccctgagcgcctctatgatcaagagatacgacgagcaccaccaggacctgaccctgctgaaagctctcgtgcggcagcagctgcctgagaagtacaaagagattttcttcgaccagagcaagaacggctacgccggctacattgacggcggagccagccaggaagagttctacaagttcatcaagcccatcctggaaaagatggacggcaccgaggaactgctcgtgaagctgaacagagaggacctgctgcggaagcagcggaccttcgacaacggcagcatcccccaccagatccacctgggagagctgcacgccattctgcggcggcaggaagatttttacccattcctgaaggacaaccgggaaaagatcgagaagatcctgaccttccgcatcccctactacgtgggccctctggccaggggaaacagcagattcgcctggatgaccagaaagagcgaggaaaccatcaccccctggaacttcgaggaagtggtggacaagggcgcttccgcccagagcttcatcgagcggatgaccaacttcgataagaacctgcccaacgagaaggtgctgcccaagcacagcctgctgtacgagtacttcaccgtgtataacgagctgaccaaagtgaaatacgtgaccgagggaatgagaaagcccgccttcctgagcggcgagcagaaaaaggccatcgtggacctgctgttcaagaccaaccggaaagtgaccgtgaagcagctgaaagaggactacttcaagaaaatcgagtgcttcgactccgtggaaatctccggcgtggaagatcggttcaacgcctccctgggcacataccacgatctgctgaaaattatcaaggacaaggacttcctggacaatgaggaaaacgaggacattctggaagatatcgtgctgaccctgacactgtttgaggacagagagatgatcgaggaacggctgaaaacctatgcccacctgttcgacgacaaagtgatgaagcagctgaagcggcggagatacaccggctggggcaggctgagccggaagctgatcaacggcatccgggacaagcagtccggcaagacaatcctggatttcctgaagtccgacggcttcgccaacagaaacttcatgcagctgatccacgacgacagcctgacctttaaagaggacatccagaaagcccaggtgtccggccagggcgatagcctgcacgagcacattgccaatctggccggcagccccgccattaagaagggcatcctgcagacagtgaaggtggtggacgagctcgtgaaagtgatgggccggcacaagcccgagaacatcgtgatcgaaatggccagagagaaccagaccacccagaagggacagaagaacagccgcgagagaatgaagcggatcgaagagggcatcaaagagctgggcagccagatcctgaaagaacaccccgtggaaaacacccagctgcagaacgagaagctgtacctgtactacctgcagaatgggcgggatatgtacgtggaccaggaactggacatcaaccggctgtccgactacgatgtggacgctatcgtgcctcagagctttctgaaggacgactccatcgacaacaaggtgctgaccagaagcgacaagaaccggggcaagagcgacaacgtgccctccgaagaggtcgtgaagaagatgaagaactactggcggcagctgctgaacgccaagctgattacccagagaaagttcgacaatctgaccaaggccgagagaggcggcctgagcgaactggataaggccggcttcatcaagagacagctggtggaaacccggcagatcacaaagcacgtggcacagatcctggactcccggatgaacactaagtacgacgagaatgacaagctgatccgggaagtgaaagtgatcaccctgaagtccaagctggtgtccgatttccggaaggatttccagttttacaaagtgcgcgagatcaacaactaccaccacgcccacgacgcctacctgaacgccgtcgtgggaaccgccctgatcaaaaagtaccctaagctggaaagcgagttcgtgtacggcgactacaaggtgtacgacgtgcggaagatgatcgccaagagcgagcaggaaatcggcaaggctaccgccaagtacttcttctacagcaacatcatgaactttttcaagaccgagattaccctggccaacggcgagatccggaagcggcctctgatcgagacaaacggcgaaaccggggagatcgtgtgggataagggccgggattttgccaccgtgcggaaagtgctgagcatgccccaagtgaatatcgtgaaaaagaccgaggtgcagacaggcggcttcagcaaagagtctatcctgcccaagaggaacagcgataagctgatcgccagaaagaaggactgggaccctaagaagtacggcggcttcgacagccccaccgtggcctattctgtgctggtggtggccaaagtggaaaagggcaagtccaagaaactgaagagtgtgaaagagctgctggggatcaccatcatggaaagaagcagcttcgagaagaatcccatcgactttctggaagccaagggctacaaagaagtgaaaaaggacctgatcatcaagctgcctaagtactccctgttcgagctggaaaacggccggaagagaatgctggcctctgccggcgaactgcagaagggaaacgaactggccctgccctccaaatatgtgaacttcctgtacctggccagccactatgagaagctgaagggctcccccgaggataatgagcagaaacagctgtttgtggaacagcacaagcactacctggacgagatcatcgagcagatcagcgagttctccaagagagtgatcctggccgacgctaatctggacaaagtgctgtccgcctacaacaagcaccgggataagcccatcagagagcaggccgagaatatcatccacctgtttaccctgaccaatctgggagcccctgccgccttcaagtactttgacaccaccatcgaccggaagaggtacaccagcaccaaagaggtgctggacgccaccctgatccaccagagcatcaccggcctgtacgagacacggatcgacctgtctcagctgggaggtgactctggaggatctagcggaggatcctctggcagcgagacaccaggaacaagcgagtcagcaacaccagagagcagtggcggcagcagcggcggcagcagcaccctaaatatagaagatgagtatcggctacatgagacctcaaaagagccagatgtttctctagggtccacatggctgtctgattttcctcaggcctgggcggaaaccgggggcatgggactggcagttcgccaagctcctctgatcatacctctgaaagcaacctctacccccgtgtccataaaacaataccccatgtcacaagaagccagactggggatcaagccccacatacagagactgttggaccagggaatactggtaccctgccagtccccctggaacacgcccctgctacccgttaagaaaccagggactaatgattataggcctgtccaggatctgagagaagtcaacaagcgggtggaagatatccaccccaccgtgcccaacccttacaacctcttgagcgggctcccaccgtcccaccagtggtacactgtgcttgatttaaaggatgcctttttctgcctgagactccaccccaccagtcagcctctcttcgcctttgagtggagagatccagagatgggaatctcaggacaattgacctggaccagactcccacagggtttcaaaaacagtcccaccctgtttaatgaggcactgcacagagacctagcagacttccggatccagcacccagacttgatcctgctacagtacgtggatgacttactgctggccgccacttctgagctagactgccaacaaggtactcgggccctgttacaaaccctagggaacctcgggtatcgggcctcggccaagaaagcccaaatttgccagaaacaggtcaagtatctggggtatcttctaaaagagggtcagagatggctgactgaggccagaaaagagactgtgatggggcagcctactcctaagacccctcgacaactaagggagttcctagggaaggcaggcttctgtcgcctcttcatccctgggtttgcagaaatggcagcccccctgtaccctctcaccaaaccggggactctgtttaattggggcccagaccaacaaaaggcctatcaagaaatcaagcaagctcttctaactgccccagccctggggttgccagatttgactaagccctttgaactctttgtcgacgagaagcagggctacgccaaaggtgtcctaacgcaaaaactgggaccttggcgtcggccggtggcctacctgtccaaaaagctagacccagtagcagctgggtggcccccttgcctacggatggtagcagccattgccgtactgacaaaggatgcaggcaagctaaccatgggacagccactagtcattctggccccccatgcagtagaggcactagtcaaacaaccccccgaccgctggctttccaacgcccggatgactcactatcaggccttgcttttggacacggaccgggtccagttcggaccggtggtagccctgaacccggctacgctgctcccactgcctgaggaagggctgcaacacaactgccttgatatcctggccgaagcccacggaacccgacccgacctaacggaccagccgctcccagacgccgaccacacctggtacacgaatggaagcagtctcttacaagagggacagcgtaaggcgggagctgcggtgaccaccgagaccgaggtaatctgggctaaagccctgccagccgggacatccgctcagcgggctgaactgatagcactcacccaggccctaaagatggcagaaggtaagaagctaaatgtttatactgatagccgttatgcttttgctactgcccatatccatggagaaatatacagaaggcgtgggtggctcacatcagaaggcaaagagatcaaaaataaagacgagatcttggccctactaaaagccctctttctgcccaaaagacttagcataatccattgtccaggacatcaaaagggacacagcgccgaggctagaggcaaccggatggctgaccaagcggcccgaaaggcagccatcacagagactccagacacctctaccctcctcatagaaaattcatcaccctctggcggctcaaaaagaaccgccgacggcagcgaattcgagcccaagaagaagaggaaagtc

SEQ ID NO: 48 - DNA, 6231 bp, synthetic construct
  misc_feature 1..6231: note = Description of Artificial Sequence: Synthetic polynucleotide
  source 1..6231: mol_type = other DNA
gacaagaagtacagcatcggcctggacatcggcaccaactctgtgggctgggccgtgatcaccgacgagtacaaggtgcccagcaagaaattcaaggtgctgggcaacaccgaccggcacagcatcaagaagaacctgatcggagccctgctgttcgacagcggcgaaacagccgaggccacccggctgaagagaaccgccagaagaagatacaccagacggaagaaccggatctgctatctgcaagagatcttcagcaacgagatggccaaggtggacgacagcttcttccacagactggaagagtccttcctggtggaagaggataagaagcacgagcggcaccccatcttcggcaacatcgtggacgaggtggcctaccacgagaagtaccccaccatctaccacctgagaaagaaactggtggacagcaccgacaaggccgacctgcggctgatctatctggccctggcccacatgatcaagttccggggccacttcctgatcgagggcgacctgaaccccgacaacagcgacgtggacaagctgttcatccagctggtgcagacctacaaccagctgttcgaggaaaaccccatcaacgccagcggcgtggacgccaaggccatcctgtctgccagactgagcaagagcagacggctggaaaatctgatcgcccagctgcccggcgagaagaagaatggcctgttcggaaacctgattgccctgagcctgggcctgacccccaacttcaagagcaacttcgacctggccgaggatgccaaactgcagctgagcaaggacacctacgacgacgacctggacaacctgctggcccagatcggcgaccagtacgccgacctgtttctggccgccaagaacctgtccgacgccatcctgctgagcgacatcctgagagtgaacaccgagatcaccaaggcccccctgagcgcctctatgatcaagagatacgacgagcaccaccaggacctgaccctgctgaaagctctcgtgcggcagcagctgcctgagaagtacaaagagattttcttcgaccagagcaagaacggctacgccggctacattgacggcggagccagccaggaagagttctacaagttcatcaagcccatcctggaaaagatggacggcaccgaggaactgctcgtgaagctgaacagagaggacctgctgcggaagcagcggaccttcgacaacggcagcatcccccaccagatccacctgggagagctgcacgccattctgcggcggcaggaagatttttacccattcctgaaggacaaccgggaaaagatcgagaagatcctgaccttccgcatcccctactacgtgggccctctggccaggggaaacagcagattcgcctggatgaccagaaagagcgaggaaaccatcaccccctggaacttcgaggaagtggtggacaagggcgcttccgcccagagcttcatcgagcggatgaccaacttcgataagaacctgcccaacgagaaggtgctgcccaagcacagcctgctgtacgagtacttcaccgtgtataacgagctgaccaaagtgaaatacgtgaccgagggaatgagaaagcccgccttcctgagcggcgagcagaaaaaggccatcgtggacctgctgttcaagaccaaccggaaagtgaccgtgaagcagctgaaagaggactacttcaagaaaatcgagtgcttcgactccgtggaaatctccggcgtggaagatcggttcaacgcctccctgggcacataccacgatctgctgaaaattatcaaggacaaggacttcctggacaatgaggaaaacgaggacattctggaagatatcgtgctgaccctgacactgtttgaggacagagagatgatcgaggaacggctgaaaacctatgcccacctgttcgacgacaaagtgatgaagcagctgaagcggcggagatacaccggctggggcaggctgagccggaagctgatcaacggcatccgggacaagcagtccggcaagacaatcctggatttcctgaagtccgacggcttcgccaacagaaacttcatgcagctgatccacgacgacagcctgacctttaaagaggacatccagaaagcccaggtgtccggccagggcgatagcctgcacgagcacattgccaatctggccggcagccccgccattaagaagggcatcctgcagacagtgaaggtggtggacgagctcgtgaaagtgatgggccggcacaagcccgagaacatcgtgatcgaaatggccagagagaaccagaccacccagaagggacagaagaacagccgcgagagaatgaagcggatcgaagagggcatcaaagagctgggcagccagatcctgaaagaacaccccgtggaaaacacccagctgcagaacgagaagctgtacctgtactacctgcagaatgggcgggatatgtacgtggaccaggaactggacatcaaccggctgtccgactacgatgtggacgctatcgtgcctcagagctttctgaaggacgactccatcgacaacaaggtgctgaccagaagcgacaagaaccggggcaagagcgacaacgtgccctccgaagaggtcgtgaagaagatgaagaactactggcggcagctgctgaacgccaagctgattacccagagaaagttcgacaatctgaccaaggccgagagaggcggcctgagcgaactggataaggccggcttcatcaagagacagctggtggaaacccggcagatcacaaagcacgtggcacagatcctggactcccggatgaacactaagtacgacgagaatgacaagctgatccgggaagtgaaagtgatcaccctgaagtccaagctggtgtccgatttccggaaggatttccagttttacaaagtgcgcgagatcaacaactaccaccacgcccacgacgcctacctgaacgccgtcgtgggaaccgccctgatcaaaaagtaccctaagctggaaagcgagttcgtgtacggcgactacaaggtgtacgacgtgcggaagatgatcgccaagagcgagcaggaaatcggcaaggctaccgccaagtacttcttctacagcaacatcatgaactttttcaagaccgagattaccctggccaacggcgagatccggaagcggcctctgatcgagacaaacggcgaaaccggggagatcgtgtgggataagggccgggattttgccaccgtgcggaaagtgctgagcatgccccaagtgaatatcgtgaaaaagaccgaggtgcagacaggcggcttcagcaaagagtctatcctgcccaagaggaacagcgataagctgatcgccagaaagaaggactgggaccctaagaagtacggcggcttcgacagccccaccgtggcctattctgtgctggtggtggccaaagtggaaaagggcaagtccaagaaactgaagagtgtgaaagagctgctggggatcaccatcatggaaagaagcagcttcgagaagaatcccatcgactttctggaagccaagggctacaaagaagtgaaaaaggacctgatcatcaagctgcctaagtactccctgttcgagctggaaaacggccggaagagaatgctggcctctgccggcgaactgcagaagggaaacgaactggccctgccctccaaatatgtgaacttcctgtacctggccagccactatgagaagctgaagggctcccccgaggataatgagcagaaacagctgtttgtggaacagcacaagcactacctggacgagatcatcgagcagatcagcgagttctccaagagagtgatcctggccgacgctaatctggacaaagtgctgtccgcctacaacaagcaccgggataagcccatcagagagcaggccgagaatatcatccacctgtttaccctgaccaatctgggagcccctgccgccttcaagtactttgacaccaccatcgaccggaagaggtacaccagcaccaaagaggtgctggacgccaccctgatccaccagagcatcaccggcctgtacgagacacggatcgacctgtctcagctgggaggtgactctggaggatctagcggaggatcctctggcagcgagacaccaggaacaagcgagtcagcaacaccagagagcagtggcggcagcagcggcggcagcagcaccctaaatatagaagatgagtatcggctacatgagacctcaaaagagccagatgtttctctagggtccacatggctgtctgattttcctcaggcctgggcggaaaccgggggcatgggactggcagttcgccaagctcctctgatcatacctctgaaagcaacctctacccccgtgtccataaaacaataccccatgtcacaagaagccagactggggatcaagccccacatacagagactgttggaccagggaatactggtaccctgccagtccccctggaacacgcccctgctacccgttaagaaaccagggactaatgattataggcctgtccaggatctgagagaagtcaacaagcgggtggaagatatccaccccaccgtgcccaacccttacaacctcttgagcgggctcccaccgtcccaccagtggtacactgtgcttgatttaaaggatgcctttttctgcctgagactccaccccaccagtcagcctctcttcgcctttgagtggagagatccagagatgggaatctcaggacaattgacctggaccagactcccacagggtttcaaaaacagtcccaccctgtttaatgaggcactgcacagagacctagcagacttccggatccagcacccagacttgatcctgctacagtacgtggatgacttactgctggccgccacttctgagctagactgccaacaaggtactcgggccctgttacaaaccctagggaacctcgggtatcgggcctcggccaagaaagcccaaatttgccagaaacaggtcaagtatctggggtatcttctaaaagagggtcagagatggctgactgaggccagaaaagagactgtgatggggcagcctactcctaagacccctcgacaactaagggagttcctagggaaggcaggcttctgtcgcctcttcatccctgggtttgcagaaatggcagcccccctgtaccctctcaccaaaccggggactctgtttaattggggcccagaccaacaaaaggcctatcaagaaatcaagcaagctcttctaactgccccagccctggggttgccagatttgactaagccctttgaactctttgtcgacgagaagcagggctacgccaaaggtgtcctaacgcaaaaactgggaccttggcgtcggccggtggcctacctgtccaaaaagctagacccagtagcagctgggtggcccccttgcctacggatggtagcagccattgccgtactgacaaaggatgcaggcaagctaaccatgggacagccactagtcattctggccccccatgcagtagaggcactagtcaaacaaccccccgaccgctggctttccaacgcccggatgactcactatcaggccttgcttttggacacggaccgggtccagttcggaccggtggtagccctgaacccggctacgctgctcccactgcctgaggaagggctgcaacacaactgccttgatatcctggccgaagcccacggaacccgacccgacctaacggaccagccgctcccagacgccgaccacacctggtacacgaatggaagcagtctcttacaagagggacagcgtaaggcgggagctgcggtgaccaccgagaccgaggtaatctgggctaaagccctgccagccgggacatccgctcagcgggctgaactgatagcactcacccaggccctaaagatggcagaaggtaagaagctaaatgtttatactgatagccgttatgcttttgctactgcccatatccatggagaaatatacagaaggcgtgggtggctcacatcagaaggcaaagagatcaaaaataaagacgagatcttggccctactaaaagccctctttctgcccaaaagacttagcataatccattgtccaggacatcaaaagggacacagcgccgaggctagaggcaaccggatggctgaccaagcggcccgaaaggcagccatcacagagactccagacacctctaccctcctcatagaaaattcatcaccc

SEQ ID NO: 49 - RNA, 6231 nt, synthetic construct
  misc_feature 1..6231: note = Description of Artificial Sequence: Synthetic polynucleotide
  source 1..6231: mol_type = other RNA
gacaagaagtacagcatcggcctggacatcggcaccaactctgtgggctgggccgtgatcaccgacgagtacaaggtgcccagcaagaaattcaaggtgctgggcaacaccgaccggcacagcatcaagaagaacctgatcggagccctgctgttcgacagcggcgaaacagccgaggccacccggctgaagagaaccgccagaagaagatacaccagacggaagaaccggatctgctatctgcaagagatcttcagcaacgagatggccaaggtggacgacagcttcttccacagactggaagagtccttcctggtggaagaggataagaagcacgagcggcaccccatcttcggcaacatcgtggacgaggtggcctaccacgagaagtaccccaccatctaccacctgagaaagaaactggtggacagcaccgacaaggccgacctgcggctgatctatctggccctggcccacatgatcaagttccggggccacttcctgatcgagggcgacctgaaccccgacaacagcgacgtggacaagctgttcatccagctggtgcagacctacaaccagctgttcgaggaaaaccccatcaacgccagcggcgtggacgccaaggccatcctgtctgccagactgagcaagagcagacggctggaaaatctgatcgcccagctgcccggcgagaagaagaatggcctgttcggaaacctgattgccctgagcctgggcctgacccccaacttcaagagcaacttcgacctggccgaggatgccaaactgcagctgagcaaggacacctacgacgacgacctggacaacctgctggcccagatcggcgaccagtacgccgacctgtttctggccgccaagaacctgtccgacgccatcctgctgagcgacatcctgagagtgaacaccgagatcaccaaggcccccctgagcgcctctatgatcaagagatacgacgagcaccaccaggacctgaccctgctgaaagctctcgtgcggcagcagctgcctgagaagtacaaagagattttcttcgaccagagcaagaacggctacgccggctacattgacggcggagccagccaggaagagttctacaagttcatcaagcccatcctggaaaagatggacggcaccgaggaactgctcgtgaagctgaacagagaggacctgctgcggaagcagcggaccttcgacaacggcagcatcccccaccagatccacctgggagagctgcacgccattctgcggcggcaggaagatttttacccattcctgaaggacaaccgggaaaagatcgagaagatcctgaccttccgcatcccctactacgtgggccctctggccaggggaaacagcagattcgcctggatgaccagaaagagcgaggaaaccatcaccccctggaacttcgaggaagtggtggacaagggcgcttccgcccagagcttcatcgagcggatgaccaacttcgataagaacctgcccaacgagaaggtgctgcccaagcacagcctgctgtacgagtacttcaccgtgtataacgagctgaccaaagtgaaatacgtgaccgagggaatgagaaagcccgccttcctgagcggcgagcagaaaaaggccatcgtggacctgctgttcaagaccaaccggaaagtgaccgtgaagcagctgaaagaggactacttcaagaaaatcgagtgcttcgactccgtggaaatctccggcgtggaagatcggttcaacgcctccctgggcacataccacgatctgctgaaaattatcaaggacaaggacttcctggacaatgaggaaaacgaggacattctggaagatatcgtgctgaccctgacactgtttgaggacagagagatgatcgaggaacggctgaaaacctatgcccacctgttcgacgacaaagtgatgaagcagctgaagcggcggagatacaccggctggggcaggctgagccggaagctgatcaacggcatccgggacaagcagtccggcaagacaatcctggatttcctgaagtccgacggcttcgccaacagaaacttcatgcagctgatccacgacgacagcctgacctttaaagaggacatccagaaagcccaggtgtccggccagggcgatagcctgcacgagcacattgccaatctggccggcagccccgccattaagaagggcatcctgcagacagtgaaggtggtggacgagctcgtgaaagtgatgggccggcacaagcccgagaacatcgtgatcgaaatggccagagagaaccagaccacccagaagggacagaagaacagccgcgagagaatgaagcggatcgaagagggcatcaaagagctgggcagccagatcctgaaagaacaccccgtggaaaacacccagctgcagaacgagaagctgtacctgtactacctgcagaatgggcgggatatgtacgtggaccaggaactggacatcaaccggctgtccgactacgatgtggacgctatcgtgcctcagagctttctgaaggacgactccatcgacaacaaggtgctgaccagaagcgacaagaaccggggcaagagcgacaacgtgccctccgaagaggtcgtgaagaagatgaagaactactggcggcagctgctgaacgccaagctgattacccagagaaagttcgacaatctgaccaaggccgagagaggcggcctgagcgaactggataaggccggcttcatcaagagacagctggtggaaacccggcagatcacaaagcacgtggcacagatcctggactcccggatgaacactaagtacgacgagaatgacaagctgatccgggaagtgaaagtgatcaccctgaagtccaagctggtgtccgatttccggaaggatttccagttttacaaagtgcgcgagatcaacaactaccaccacgcccacgacgcctacctgaacgccgtcgtgggaaccgccctgatcaaaaagtaccctaagctggaaagcgagttcgtgtacggcgactacaaggtgtacgacgtgcggaagatgatcgccaagagcgagcaggaaatcggcaaggctaccgccaagtacttcttctacagcaacatcatgaactttttcaagaccgagattaccctggccaacggcgagatccggaagcggcctctgatcgagacaaacggcgaaaccggggagatcgtgtgggataagggccgggattttgccaccgtgcggaaagtgctgagcatgccccaagtgaatatcgtgaaaaagaccgaggtgcagacaggcggcttcagcaaagagtctatcctgcccaagaggaacagcgataagctgatcgccagaaagaaggactgggaccctaagaagtacggcggcttcgacagccccaccgtggcctattctgtgctggtggtggccaaagtggaaaagggcaagtccaagaaactgaagagtgtgaaagagctgctggggatcaccatcatggaaagaagcagcttcgagaagaatcccatcgactttctggaagccaagggctacaaagaagtgaaaaaggacctgatcatcaagctgcctaagtactccctgttcgagctggaaaacggccggaagagaatgctggcctctgccggcgaactgcagaagggaaacgaactggccctgccctccaaatatgtgaacttcctgtacctggccagccactatgagaagctgaagggctcccccgaggataatgagcagaaacagctgtttgtggaacagcacaagcactacctggacgagatcatcgagcagatcagcgagttctccaagagagtgatcctggccgacgctaatctggacaaagtgctgtccgcctacaacaagcaccgggataagcccatcagagagcaggccgagaatatcatccacctgtttaccctgaccaatctgggagcccctgccgccttcaagtactttgacaccaccatcgaccggaagaggtacaccagcaccaaagaggtgctggacgccaccctgatccaccagagcatcaccggcctgtacgagacacggatcgacctgtctcagctgggaggtgactctggaggatctagcggaggatcctctggcagcgagacaccaggaacaagcgagtcagcaacaccagagagcagtggcggcagcagcggcggcagcagcaccctaaatatagaagatgagtatcggctacatgagacctcaaaagagccagatgtttctctagggtccacatggctgtctgattttcctcaggcctgggcggaaaccgggggcatgggactggcagttcgccaagctcctctgatcatacctctgaaagcaacctctacccccgtgtccataaaacaataccccatgtcacaagaagccagactggggatcaagccccacatacagagactgttggaccagggaatactggtaccctgccagtccccctggaacacgcccctgctacccgttaagaaaccagggactaatgattataggcctgtccaggatctgagagaagtcaacaagcgggtggaagatatccaccccaccgtgcccaacccttacaacctcttgagcgggctcccaccgtcccaccagtggtacactgtgcttgatttaaaggatgcctttttctgcctgagactccaccccaccagtcagcctctcttcgcctttgagtggagagatccagagatgggaatctcaggacaattgacctggaccagactcccacagggtttcaaaaacagtcccaccctgtttaatgaggcactgcacagagacctagcagacttccggatccagcacccagacttgatcctgctacagtacgtggatgacttactgctggccgccacttctgagctagactgccaacaaggtactcgggccctgttacaaaccctagggaacctcgggtatcgggcctcggccaagaaagcccaaatttgccagaaacaggtcaagtatctggggtatcttctaaaagagggtcagagatggctgactgaggccagaaaagagactgtgatggggcagcctactcctaagacccctcgacaactaagggagttcctagggaaggcaggcttctgtcgcctcttcatccctgggtttgcagaaatggcagcccccctgtaccctctcaccaaaccggggactctgtttaattggggcccagaccaacaaaaggcctatcaagaaatcaagcaagctcttctaactgccccagccctggggttgccagatttgactaagccctttgaactctttgtcgacgagaagcagggctacgccaaaggtgtcctaacgcaaaaactgggaccttggcgtcggccggtggcctacctgtccaaaaagctagacccagtagcagctgggtggcccccttgcctacggatggtagcagccattgccgtactgacaaaggatgcaggcaagctaaccatgggacagccactagtcattctggccccccatgcagtagaggcactagtcaaacaaccccccgaccgctggctttccaacgcccggatgactcactatcaggccttgcttttggacacggaccgggtccagttcggaccggtggtagccctgaacccggctacgctgctcccactgcctgaggaagggctgcaacacaactgccttgatatcctggccgaagcccacggaacccgacccgacctaacggaccagccgctcccagacgccgaccacacctggtacacgaatggaagcagtctcttacaagagggacagcgtaaggcgggagctgcggtgaccaccgagaccgaggtaatctgggctaaagccctgccagccgggacatccgctcagcgggctgaactgatagcactcacccaggccctaaagatggcagaaggtaagaagctaaatgtttatactgatagccgttatgcttttgctactgcccatatccatggagaaatatacagaaggcgtgggtggctcacatcagaaggcaaagagatcaaaaataaagacgagatcttggccctactaaaagccctctttctgcccaaaagacttagcataatccattgtccaggacatcaaaagggacacagcgccgaggctagaggcaaccggatggctgaccaagcggcccgaaaggcagccatcacagagactccagacacctctaccctcctcatagaaaattcatcaccc

SEQ ID NO: 50 - DNA, 2031 bp, synthetic construct
  misc_feature 1..2031: note = Description of Artificial Sequence: Synthetic polynucleotide
  source 1..2031: mol_type = other DNA
accctaaatatagaagatgagtatcggctacatgagacctcaaaagagccagatgtttctctagggtccacatggctgtctgattttcctcaggcctgggcggaaaccgggggcatgggactggcagttcgccaagctcctctgatcatacctctgaaagcaacctctacccccgtgtccataaaacaataccccatgtcacaagaagccagactggggatcaagccccacatacagagactgttggaccagggaatactggtaccctgccagtccccctggaacacgcccctgctacccgttaagaaaccagggactaatgattataggcctgtccaggatctgagagaagtcaacaagcgggtggaagatatccaccccaccgtgcccaacccttacaacctcttgagcgggctcccaccgtcccaccagtggtacactgtgcttgatttaaaggatgcctttttctgcctgagactccaccccaccagtcagcctctcttcgcctttgagtggagagatccagagatgggaatctcaggacaattgacctggaccagactcccacagggtttcaaaaacagtcccaccctgtttaatgaggcactgcacagagacctagcagacttccggatccagcacccagacttgatcctgctacagtacgtggatgacttactgctggccgccacttctgagctagactgccaacaaggtactcgggccctgttacaaaccctagggaacctcgggtatcgggcctcggccaagaaagcccaaatttgccagaaacaggtcaagtatctggggtatcttctaaaagagggtcagagatggctgactgaggccagaaaagagactgtgatggggcagcctactcctaagacccctcgacaactaagggagttcctagggaaggcaggcttctgtcgcctcttcatccctgggtttgcagaaatggcagcccccctgtaccctctcaccaaaccggggactctgtttaattggggcccagaccaacaaaaggcctatcaagaaatcaagcaagctcttctaactgccccagccctggggttgccagatttgactaagccctttgaactctttgtcgacgagaagcagggctacgccaaaggtgtcctaacgcaaaaactgggaccttggcgtcggccggtggcctacctgtccaaaaagctagacccagtagcagctgggtggcccccttgcctacggatggtagcagccattgccgtactgacaaaggatgcaggcaagctaaccatgggacagccactagtcattctggccccccatgcagtagaggcactagtcaaacaaccccccgaccgctggctttccaacgcccggatgactcactatcaggccttgcttttggacacggaccgggtccagttcggaccggtggtagccctgaacccggctacgctgctcccactgcctgaggaagggctgcaacacaactgccttgatatcctggccgaagcccacggaacccgacccgacctaacggaccagccgctcccagacgccgaccacacctggtacacgaatggaagcagtctcttacaagagggacagcgtaaggcgggagctgcggtgaccaccgagaccgaggtaatctgggctaaagccctgccagccgggacatccgctcagcgggctgaactgatagcactcacccaggccctaaagatggcagaaggtaagaagctaaatgtttatactgatagccgttatgcttttgctactgcccatatccatggagaaatatacagaaggcgtgggtggctcacatcagaaggcaaagagatcaaaaataaagacgagatcttggccctactaaaagccctctttctgcccaaaagacttagcataatccattgtccaggacatcaaaagggacacagcgccgaggctagaggcaaccggatggctgaccaagcggcccgaaaggcagccatcacagagactccagacacctctaccctcctcatagaaaattcatcaccc

SEQ ID NO: 51 - RNA, 2031 nt, synthetic construct
  misc_feature 1..2031: note = Description of Artificial Sequence: Synthetic polynucleotide
  source 1..2031: mol_type = other RNA
accctaaatatagaagatgagtatcggctacatgagacctcaaaagagccagatgtttctctagggtccacatggctgtctgattttcctcaggcctgggcggaaaccgggggcatgggactggcagttcgccaagctcctctgatcatacctctgaaagcaacctctacccccgtgtccataaaacaataccccatgtcacaagaagccagactggggatcaagccccacatacagagactgttggaccagggaatactggtaccctgccagtccccctggaacacgcccctgctacccgttaagaaaccagggactaatgattataggcctgtccaggatctgagagaagtcaacaagcgggtggaagatatccaccccaccgtgcccaacccttacaacctcttgagcgggctcccaccgtcccaccagtggtacactgtgcttgatttaaaggatgcctttttctgcctgagactccaccccaccagtcagcctctcttcgcctttgagtggagagatccagagatgggaatctcaggacaattgacctggaccagactcccacagggtttcaaaaacagtcccaccctgtttaatgaggcactgcacagagacctagcagacttccggatccagcacccagacttgatcctgctacagtacgtggatgacttactgctggccgccacttctgagctagactgccaacaaggtactcgggccctgttacaaaccctagggaacctcgggtatcgggcctcggccaagaaagcccaaatttgccagaaacaggtcaagtatctggggtatcttctaaaagagggtcagagatggctgactgaggccagaaaagagactgtgatggggcagcctactcctaagacccctcgacaactaagggagttcctagggaaggcaggcttctgtcgcctcttcatccctgggtttgcagaaatggcagcccccctgtaccctctcaccaaaccggggactctgtttaattggggcccagaccaacaaaaggcctatcaagaaatcaagcaagctcttctaactgccccagccctggggttgccagatttgactaagccctttgaactctttgtcgacgagaagcagggctacgccaaaggtgtcctaacgcaaaaactgggaccttggcgtcggccggtggcctacctgtccaaaaagctagacccagtagcagctgggtggcccccttgcctacggatggtagcagccattgccgtactgacaaaggatgcaggcaagctaaccatgggacagccactagtcattctggccccccatgcagtagaggcactagtcaaacaaccccccgaccgctggctttccaacgcccggatgactcactatcaggccttgcttttggacacggaccgggtccagttcggaccggtggtagccctgaacccggctacgctgctcccactgcctgaggaagggctgcaacacaactgccttgatatcctggccgaagcccacggaacccgacccgacctaacggaccagccgctcccagacgccgaccacacctggtacacgaatggaagcagtctcttacaagagggacagcgtaaggcgggagctgcggtgaccaccgagaccgaggtaatctgggctaaagccctgccagccgggacatccgctcagcgggctgaactgatagcactcacccaggccctaaagatggcagaaggtaagaagctaaatgtttatactgatagccgttatgcttttgctactgcccatatccatggagaaatatacagaaggcgtgggtggctcacatcagaaggcaaagagatcaaaaataaagacgagatcttggccctactaaaagccctctttctgcccaaaagacttagcataatccattgtccaggacatcaaaagggacacagcgccgaggctagaggcaaccggatggctgaccaagcggcccgaaaggcagccatcacagagactccagacacctctaccctcctcatagaaaattcatcaccc

SEQ ID NO: 52 - protein, 1916 aa, synthetic construct
  REGION 1..1916: note = Description of Artificial Sequence: Synthetic polypeptide
MKRTADGSEFESPKKKRKVDKKYSIGLDIGTNSVGWAVITDEYKVPSKKFKVLGNTDRHSIKKNLIGALLFDSGETAEATRLKRTARRRYTRRKNRICYLQEIFSNEMAKVDDSFFHRLEESFLVEEDKKHERHPIFGNIVDEVAYHEKYPTIYHLRKKLVDSTDKADLRLIYLALAHMIKFRGHFLIEGDLNPDNSDVDKLFIQLVQTYNQLFEENPINASGVDAKAILSARLSKSRRLENLIAQLPGEKKNGLFGNLIALSLGLTPNFKSNFDLAEDAKLQLSKDTYDDDLDNLLAQIGDQYADLFLAAKNLSDAILLSDILRVNTEITKAPLSASMIKRYDEHHQDLTLLKALVRQQLPEKYKEIFFDQSKNGYAGYIDGGASQEEFYKFIKPILEKMDGTEELLVKLNREDLLRKQRTFDNGSIPHQIHLGELHAILRRQEDFYPFLKDNREKIEKILTFRIPYYVGPLARGNSRFAWMTRKSEETITPWNFEEVVDKGASAQSFIERMTNFDKNLPNEKVLPKHSLLYEYFTVYNELTKVKYVTEGMRKPAFLSGEQKKAIVDLLFKTNRKVTVKQLKEDYFKKIECFDSVEISGVEDRFNASLGTYHDLLKIIKDKDFLDNEENEDILEDIVLTLTLFEDREMIEERLKTYAHLFDDKVMKQLKRRRYTGWGRLSRKLINGIRDKQSGKTILDFLKSDGFANRNFMQLIHDDSLTFKEDIQKAQVSGQGDSLHEHIANLAGSPAIKKGILQTVKVVDELVKVMGRHKPENIVIEMARENQTTQKGQKNSRERMKRIEEGIKELGSQILKEHPVENTQLQNEKLYLYYLQNGRDMYVDQELDINRLSDYDVDAIVPQSFLKDDSIDNKVLTRSDKNRGKSDNVPSEEVVKKMKNYWRQLLNAKLITQRKFDNLTKAERGGLSELDKAGFIKRQLVETRQITKHVAQILDSRMNTKYDENDKLIREVKVITLKSKLVSDFRKDFQFYKVREINNYHHAHDAYLNAVVGTALIKKYPKLESEFVYGDYKVYDVRKMIAKSEQEIGKATAKYFFYSNIMNFFKTEITLANGEIRKRPLIETNGETGEIVWDKGRDFATVRKVLSMPQVNIVKKTEVQTGGFSKESILPKRNSDKLIARKKDWDPKKYGGFDSPTVAYSVLVVAKVEKGKSKKLKSVKELLGITIMERSSFEKNPIDFLEAKGYKEVKKDLIIKLPKYSLFELENGRKRMLASAGELQKGNELALPSKYVNFLYLASHYEKLKGSPEDNEQKQLFVEQHKHYLDEIIEQISEFSKRVILADANLDKVLSAYNKHRDKPIREQAENIIHLFTLTNLGAPAAFKYFDTTIDRKRYTSTKEVLDATLIHQSITGLYETRIDLSQLGGDSGGSSGGSSGSETPGTSESATPESSGGSSGGSSTLNIEDEYRLHETSKEPDVSLGSTWLSDFPQAWAETGGMGLAVRQAPLIIPLKATSTPVSIKQYPMSQEARLGIKPHIQRLLDQGILVPCQSPWNTPLLPVKKPGTNDYRPVQDLREVNKRVEDIHPTVPNPYNLLSGLPPSHQWYTVLDLKDAFFCLRLHPTSQPLFAFEWRDPEMGISGQLTWTRLPQGFKNSPTLFNEALHRDLADFRIQHPDLILLQYVDDLLLAATSELDCQQGTRALLQTLGNLGYRASAKKAQICQKQVKYLGYLLKEGQRWLTEARKETVMGQPTPKTPRQLREFLGKAGFCRLFIPGFAEMAAPLYPLTKPGTLFNWGPDQQKAYQEIKQALLTAPALGLPDLTKPFELFVDEKQGYAKGVLTQKLGPWRRPVAYLSKKLDPVAAGWPPCLRMVAAIAVLTKDAGKLTMGQPLVILAPHAVEALVKQPPDRWLSNARMTHYQALLLDTDRVQFGPVVALGSKRTADGSEFEPKKKRKV

SEQ ID NO: 53 - protein, 1878 aa, synthetic construct
  REGION 1..1878: note = Description of Artificial Sequence: Synthetic polypeptide
DKKYSIGLDIGTNSVGWAVITDEYKVPSKKFKVLGNTDRHSIKKNLIGALLFDSGETAEATRLKRTARRRYTRRKNRICYLQEIFSNEMAKVDDSFFHRLEESFLVEEDKKHERHPIFGNIVDEVAYHEKYPTIYHLRKKLVDSTDKADLRLIYLALAHMIKFRGHFLIEGDLNPDNSDVDKLFIQLVQTYNQLFEENPINASGVDAKAILSARLSKSRRLENLIAQLPGEKKNGLFGNLIALSLGLTPNFKSNFDLAEDAKLQLSKDTYDDDLDNLLAQIGDQYADLFLAAKNLSDAILLSDILRVNTEITKAPLSASMIKRYDEHHQDLTLLKALVRQQLPEKYKEIFFDQSKNGYAGYIDGGASQEEFYKFIKPILEKMDGTEELLVKLNREDLLRKQRTFDNGSIPHQIHLGELHAILRRQEDFYPFLKDNREKIEKILTFRIPYYVGPLARGNSRFAWMTRKSEETITPWNFEEVVDKGASAQSFIERMTNFDKNLPNEKVLPKHSLLYEYFTVYNELTKVKYVTEGMRKPAFLSGEQKKAIVDLLFKTNRKVTVKQLKEDYFKKIECFDSVEISGVEDRFNASLGTYHDLLKIIKDKDFLDNEENEDILEDIVLTLTLFEDREMIEERLKTYAHLFDDKVMKQLKRRRYTGWGRLSRKLINGIRDKQSGKTILDFLKSDGFANRNFMQLIHDDSLTFKEDIQKAQVSGQGDSLHEHIANLAGSPAIKKGILQTVKVVDELVKVMGRHKPENIVIEMARENQTTQKGQKNSRERMKRIEEGIKELGSQILKEHPVENTQLQNEKLYLYYLQNGRDMYVDQELDINRLSDYDVDAIVPQSFLKDDSIDNKVLTRSDKNRGKSDNVPSEEVVKKMKNYWRQLLNAKLITQRKFDNLTKAERGGLSELDKAGFIKRQLVETRQITKHVAQILDSRMNTKYDENDKLIREVKVITLKSKLVSDFRKDFQFYKVREINNYHHAHDAYLNAVVGTALIKKYPKLESEFVYGDYKVYDVRKMIAKSEQEIGKATAKYFFYSNIMNFFKTEITLANGEIRKRPLIETNGETGEIVWDKGRDFATVRKVLSMPQVNIVKKTEVQTGGFSKESILPKRNSDKLIARKKDWDPKKYGGFDSPTVAYSVLVVAKVEKGKSKKLKSVKELLGITIMERSSFEKNPIDFLEAKGYKEVKKDLIIKLPKYSLFELENGRKRMLASAGELQKGNELALPSKYVNFLYLASHYEKLKGSPEDNEQKQLFVEQHKHYLDEIIEQISEFSKRVILADANLDKVLSAYNKHRDKPIREQAENIIHLFTLTNLGAPAAFKYFDTTIDRKRYTSTKEVLDATLIHQSITGLYETRIDLSQLGGDSGGSSGGSSGSETPGTSESATPESSGGSSGGSSTLNIEDEYRLHETSKEPDVSLGSTWLSDFPQAWAETGGMGLAVRQAPLIIPLKATSTPVSIKQYPMSQEARLGIKPHIQRLLDQGILVPCQSPWNTPLLPVKKPGTNDYRPVQDLREVNKRVEDIHPTVPNPYNLLSGLPPSHQWYTVLDLKDAFFCLRLHPTSQPLFAFEWRDPEMGISGQLTWTRLPQGFKNSPTLFNEALHRDLADFRIQHPDLILLQYVDDLLLAATSELDCQQGTRALLQTLGNLGYRASAKKAQICQKQVKYLGYLLKEGQRWLTEARKETVMGQPTPKTPRQLREFLGKAGFCRLFIPGFAEMAAPLYPLTKPGTLFNWGPDQQKAYQEIKQALLTAPALGLPDLTKPFELFVDEKQGYAKGVLTQKLGPWRRPVAYLSKKLDPVAAGWPPCLRMVAAIAVLTKDAGKLTMGQPLVILAPHAVEALVKQPPDRWLSNARMTHYQALLLDTDRVQFGPVVAL

SEQ ID NO: 54 - protein, 478 aa, synthetic construct
  REGION 1..478: note = Description of Artificial Sequence: Synthetic polypeptide
TLNIEDEYRLHETSKEPDVSLGSTWLSDFPQAWAETGGMGLAVRQAPLIIPLKATSTPVSIKQYPMSQEARLGIKPHIQRLLDQGILVPCQSPWNTPLLPVKKPGTNDYRPVQDLREVNKRVEDIHPTVPNPYNLLSGLPPSHQWYTVLDLKDAFFCLRLHPTSQPLFAFEWRDPEMGISGQLTWTRLPQGFKNSPTLFNEALHRDLADFRIQHPDLILLQYVDDLLLAATSELDCQQGTRALLQTLGNLGYRASAKKAQICQKQVKYLGYLLKEGQRWLTEARKETVMGQPTPKTPRQLREFLGKAGFCRLFIPGFAEMAAPLYPLTKPGTLFNWGPDQQKAYQEIKQALLTAPALGLPDLTKPFELFVDEKQGYAKGVLTQKLGPWRRPVAYLSKKLDPVAAGWPPCLRMVAAIAVLTKDAGKLTMGQPLVILAPHAVEALVKQPPDRWLSNARMTHYQALLLDTDRVQFGPVVAL

SEQ ID NO: 55 - DNA, 5748 bp, synthetic construct
  misc_feature 1..5748: note = Description of Artificial Sequence: Synthetic polynucleotide
  source 1..5748: mol_type = other DNA
atgaaacgtacagccgacggaagcgagttcgagtcaccaaagaagaagcggaaagtcgacaagaagtacagcatcggcctggacatcggcaccaactctgtgggctgggccgtgatcaccgacgagtacaaggtgcccagcaagaaattcaaggtgctgggcaacaccgaccggcacagcatcaagaagaacctgatcggagccctgctgttcgacagcggcgaaacagccgaggccacccggctgaagagaaccgccagaagaagatacaccagacggaagaaccggatctgctatctgcaagagatcttcagcaacgagatggccaaggtggacgacagcttcttccacagactggaagagtccttcctggtggaagaggataagaagcacgagcggcaccccatcttcggcaacatcgtggacgaggtggcctaccacgagaagtaccccaccatctaccacctgagaaagaaactggtggacagcaccgacaaggccgacctgcggctgatctatctggccctggcccacatgatcaagttccggggccacttcctgatcgagggcgacctgaaccccgacaacagcgacgtggacaagctgttcatccagctggtgcagacctacaaccagctgttcgaggaaaaccccatcaacgccagcggcgtggacgccaaggccatcctgtctgccagactgagcaagagcagacggctggaaaatctgatcgcccagctgcccggcgagaagaagaatggcctgttcggaaacctgattgccctgagcctgggcctgacccccaacttcaagagcaacttcgacctggccgaggatgccaaactgcagctgagcaaggacacctacgacgacgacctggacaacctgctggcccagatcggcgaccagtacgccgacctgtttctggccgccaagaacctgtccgacgccatcctgctgagcgacatcctgagagtgaacaccgagatcaccaaggcccccctgagcgcctctatgatcaagagatacgacgagcaccaccaggacctgaccctgctgaaagctctcgtgcggcagcagctgcctgagaagtacaaagagattttcttcgaccagagcaagaacggctacgccggctacattgacggcggagccagccaggaagagttctacaagttcatcaagcccatcctggaaaagatggacggcaccgaggaactgctcgtgaagctgaacagagaggacctgctgcggaagcagcggaccttcgacaacggcagcatcccccaccagatccacctgggagagctgcacgccattctgcggcggcaggaagatttttacccattcctgaaggacaaccgggaaaagatcgagaagatcctgaccttccgcatcccctactacgtgggccctctggccaggggaaacagcagattcgcctggatgaccagaaagagcgaggaaaccatcaccccctggaacttcgaggaagtggtggacaagggcgcttccgcccagagcttcatcgagcggatgaccaacttcgataagaacctgcccaacgagaaggtgctgcccaagcacagcctgctgtacgagtacttcaccgtgtataacgagctgaccaaagtgaaatacgtgaccgagggaatgagaaagcccgccttcctgagcggcgagcagaaaaaggccatcgtggacctgctgttcaagaccaaccggaaagtgaccgtgaagcagctgaaagaggactacttcaagaaaatcgagtgcttcgactccgtggaaatctccggcgtggaagatcggttcaacgcctccctgggcacataccacgatctgctgaaaattatcaaggacaaggacttcctggacaatgaggaaaacgaggacattctggaagatatcgtgctgaccctgacactgtttgaggacagagagatgatcgaggaacggctgaaaacctatgcccacctgttcgacgacaaagtgatgaagcagctgaagcggcggagatacaccggctggggcaggctgagccggaagctgatcaacggcatccgggacaagcagtccggcaagacaatcctggatttcctgaagtccgacggcttcgccaacagaaacttcatgcagctgatccacgacgacagcctgacctttaaagaggacatccagaaagcccaggtgtccggccagggcgatagcctgcacgagcacattgccaatctggccggcagccccgccattaagaagggcatcctgcagacagtgaaggtggtggacgagctcgtgaaagtgatgggccggcacaagcccgagaacatcgtgatcgaaatggccagagagaaccagaccacccagaagggacagaagaacagccgcgagagaatgaagcggatcgaagagggcatcaaagagctgggcagccagatcctgaaagaacaccccgtggaaaacacccagctgcagaacgagaagctgtacctgtactacctgcagaatgggcgggatatgtacgtggaccaggaactggacatcaaccggctgtccgactacgatgtggacgctatcgtgcctcagagctttctgaaggacgactccatcgacaacaaggtgctgaccagaagcgacaagaaccggggcaagagcgacaacgtgccctccgaagaggtcgtgaagaagatgaagaactactggcggcagctgctgaacgccaagctgattacccagagaaagttcgacaatctgaccaaggccgagagaggcggcctgagcgaactggataaggccggcttcatcaagagacagctggtggaaacccggcagatcacaaagcacgtggcacagatcctggactcccggatgaacactaagtacgacgagaatgacaagctgatccgggaagtgaaagtgatcaccctgaagtccaagctggtgtccgatttccggaaggatttccagttttacaaagtgcgcgagatcaacaactaccaccacgcccacgacgcctacctgaacgccgtcgtgggaaccgccctgatcaaaaagtaccctaagctggaaagcgagttcgtgtacggcgactacaaggtgtacgacgtgcggaagatgatcgccaagagcgagcaggaaatcggcaaggctaccgccaagtacttcttctacagcaacatcatgaactttttcaagaccgagattaccctggccaacggcgagatccggaagcggcctctgatcgagacaaacggcgaaaccggggagatcgtgtgggataagggccgggattttgccaccgtgcggaaagtgctgagcatgccccaagtgaatatcgtgaaaaagaccgaggtgcagacaggcggcttcagcaaagagtctatcctgcccaagaggaacagcgataagctgatcgccagaaagaaggactgggaccctaagaagtacggcggcttcgacagccccaccgtggcctattctgtgctggtggtggccaaagtggaaaagggcaagtccaagaaactgaagagtgtgaaagagctgctggggatcaccatcatggaaagaagcagcttcgagaagaatcccatcgactttctggaagccaagggctacaaagaagtgaaaaaggacctgatcatcaagctgcctaagtactccctgttcgagctggaaaacggccggaagagaatgctggcctctgccggcgaactgcagaagggaaacgaactggccctgccctccaaatatgtgaacttcctgtacctggccagccactatgagaagctgaagggctcccccgaggataatgagcagaaacagctgtttgtggaacagcacaagcactacctggacgagatcatcgagcagatcagcgagttctccaagagagtgatcctggccgacgctaatctggacaaagtgctgtccgcctacaacaagcaccgggataagcccatcagagagcaggccgagaatatcatccacctgtttaccctgaccaatctgggagcccctgccgccttcaagtactttgacaccaccatcgaccggaagaggtacaccagcaccaaagaggtgctggacgccaccctgatccaccagagcatcaccggcctgtacgagacacggatcgacctgtctcagctgggaggtgactctggaggatctagcggaggatcctctggcagcgagacaccaggaacaagcgagtcagcaacaccagagagcagtggcggcagcagcggcggcagcagcaccctaaatatagaagatgagtatcggctacatgagacctcaaaagagccagatgtttctctagggtccacatggctgtctgattttcctcaggcctgggcggaaaccgggggcatgggactggcagttcgccaagctcctctgatcatacctctgaaagcaacctctacccccgtgtccataaaacaataccccatgtcacaagaagccagactggggatcaagccccacatacagagactgttggaccagggaatactggtaccctgccagtccccctggaacacgcccctgctacccgttaagaaaccagggactaatgattataggcctgtccaggatctgagagaagtcaacaagcgggtggaagatatccaccccaccgtgcccaacccttacaacctcttgagcgggctcccaccgtcccaccagtggtacactgtgcttgatttaaaggatgcctttttctgcctgagactccaccccaccagtcagcctctcttcgcctttgagtggagagatccagagatgggaatctcaggacaattgacctggaccagactcccacagggtttcaaaaacagtcccaccctgtttaatgaggcactgcacagagacctagcagacttccggatccagcacccagacttgatcctgctacagtacgtggatgacttactgctggccgccacttctgagctagactgccaacaaggtactcgggccctgttacaaaccctagggaacctcgggtatcgggcctcggccaagaaagcccaaatttgccagaaacaggtcaagtatctggggtatcttctaaaagagggtcagagatggctgactgaggccagaaaagagactgtgatggggcagcctactcctaagacccctcgacaactaagggagttcctagggaaggcaggcttctgtcgcctcttcatccctgggtttgcagaaatggcagcccccctgtaccctctcaccaaaccggggactctgtttaattggggcccagaccaacaaaaggcctatcaagaaatcaagcaagctcttctaactgccccagccctggggttgccagatttgactaagccctttgaactctttgtcgacgagaagcagggctacgccaaaggtgtcctaacgcaaaaactgggaccttggcgtcggccggtggcctacctgtccaaaaagctagacccagtagcagctgggtggcccccttgcctacggatggtagcagccattgccgtactgacaaaggatgcaggcaagctaaccatgggacagccactagtcattctggccccccatgcagtagaggcactagtcaaacaaccccccgaccgctggctttccaacgcccggatgactcactatcaggccttgcttttggacacggaccgggtccagttcggaccggtggtagccctgggctcaaaaagaaccgccgacggcagcgaattcgagcccaagaagaagaggaaagtc

SEQ ID NO: 56 - RNA, 5748 nt, synthetic construct
  misc_feature 1..5748: note = Description of Artificial Sequence: Synthetic polynucleotide
  source 1..5748: mol_type = other RNA
atgaaacgtacagccgacggaagcgagttcgagtcaccaaagaagaagcggaaagtcgacaagaagtacagcatcggcctggacatcggcaccaactctgtgggctgggccgtgatcaccgacgagtacaaggtgcccagcaagaaattcaaggtgctgggcaacaccgaccggcacagcatcaagaagaacctgatcggagccctgctgttcgacagcggcgaaacagccgaggccacccggctgaagagaaccgccagaagaagatacaccagacggaagaaccggatctgctatctgcaagagatcttcagcaacgagatggccaaggtggacgacagcttcttccacagactggaagagtccttcctggtggaagaggataagaagcacgagcggcaccccatcttcggcaacatcgtggacgaggtggcctaccacgagaagtaccccaccatctaccacctgagaaagaaactggtggacagcaccgacaaggccgacctgcggctgatctatctggccctggcccacatgatcaagttccggggccacttcctgatcgagggcgacctgaaccccgacaacagcgacgtggacaagctgttcatccagctggtgcagacctacaaccagctgttcgaggaaaaccccatcaacgccagcggcgtggacgccaaggccatcctgtctgccagactgagcaagagcagacggctggaaaatctgatcgcccagctgcccggcgagaagaagaatggcctgttcggaaacctgattgccctgagcctgggcctgacccccaacttcaagagcaacttcgacctggccgaggatgccaaactgcagctgagcaaggacacctacgacgacgacctggacaacctgctggcccagatcggcgaccagtacgccgacctgtttctggccgccaagaacctgtccgacgccatcctgctgagcgacatcctgagagtgaacaccgagatcaccaaggcccccctgagcgcctctatgatcaagagatacgacgagcaccaccaggacctgaccctgctgaaagctctcgtgcggcagcagctgcctgagaagtacaaagagattttcttcgaccagagcaagaacggctacgccggctacattgacggcggagccagccaggaagagttctacaagttcatcaagcccatcctggaaaagatggacggcaccgaggaactgctcgtgaagctgaacagagaggacctgctgcggaagcagcggaccttcgacaacggcagcatcccccaccagatccacctgggagagctgcacgccattctgcggcggcaggaagatttttacccattcctgaaggacaaccgggaaaagatcgagaagatcctgaccttccgcatcccctactacgtgggccctctggccaggggaaacagcagattcgcctggatgaccagaaagagcgaggaaaccatcaccccctggaacttcgaggaagtggtggacaagggcgcttccgcccagagcttcatcgagcggatgaccaacttcgataagaacctgcccaacgagaaggtgctgcccaagcacagcctgctgtacgagtacttcaccgtgtataacgagctgaccaaagtgaaatacgtgaccgagggaatgagaaagcccgccttcctgagcggcgagcagaaaaaggccatcgtggacctgctgttcaagaccaaccggaaagtgaccgtgaagcagctgaaagaggactacttcaagaaaatcgagtgcttcgactccgtggaaatctccggcgtggaagatcggttcaacgcctccctgggcacataccacgatctgctgaaaattatcaaggacaaggacttcctggacaatgaggaaaacgaggacattctggaagatatcgtgctgaccctgacactgtttgaggacagagagatgatcgaggaacggctgaaaacctatgcccacctgttcgacgacaaagtgatgaagcagctgaagcggcggagatacaccggctggggcaggctgagccggaagctgatcaacggcatccgggacaagcagtccggcaagacaatcctggatttcctgaagtccgacggcttcgccaacagaaacttcatgcagctgatccacgacgacagcctgacctttaaagaggacatccagaaagcccaggtgtccggccagggcgatagcctgcacgagcacattgccaatctggccggcagccccgccattaagaagggcatcctgcagacagtgaaggtggtggacgagctcgtgaaagtgatgggccggcacaagcccgagaacatcgtgatcgaaatggccagagagaaccagaccacccagaagggacagaagaacagccgcgagagaatgaagcggatcgaagagggcatcaaagagctgggcagccagatcctgaaagaacaccccgtggaaaacacccagctgcagaacgagaagctgtacctgtactacctgcagaatgggcgggatatgtacgtggaccaggaactggacatcaaccggctgtccgactacgatgtggacgctatcgtgcctcagagctttctgaaggacgactccatcgacaacaaggtgctgaccagaagcgacaagaaccggggcaagagcgacaacgtgccctccgaagaggtcgtgaagaagatgaagaactactggcggcagctgctgaacgccaagctgattacccagagaaagttcgacaatctgaccaaggccgagagaggcggcctgagcgaactggataaggccggcttcatcaagagacagctggtggaaacccggcagatcacaaagcacgtggcacagatcctggactcccggatgaacactaagtacgacgagaatgacaagctgatccgggaagtgaaagtgatcaccctgaagtccaagctggtgtccgatttccggaaggatttccagttttacaaagtgcgcgagatcaacaactaccaccacgcccacgacgcctacctgaacgccgtcgtgggaaccgccctgatcaaaaagtaccctaagctggaaagcgagttcgtgtacggcgactacaaggtgtacgacgtgcggaagatgatcgccaagagcgagcaggaaatcggcaaggctaccgccaagtacttcttctacagcaacatcatgaactttttcaagaccgagattaccctggccaacggcgagatccggaagcggcctctgatcgagacaaacggcgaaaccggggagatcgtgtgggataagggccgggattttgccaccgtgcggaaagtgctgagcatgccccaagtgaatatcgtgaaaaagaccgaggtgcagacaggcggcttcagcaaagagtctatcctgcccaagaggaacagcgataagctgatcgccagaaagaaggactgggaccctaagaagtacggcggcttcgacagccccaccgtggcctattctgtgctggtggtggccaaagtggaaaagggcaagtccaagaaactgaagagtgtgaaagagctgctggggatcaccatcatggaaagaagcagcttcgagaagaatcccatcgactttctggaagccaagggctacaaagaagtgaaaaaggacctgatcatcaagctgcctaagtactccctgttcgagctggaaaacggccggaagagaatgctggcctctgccggcgaactgcagaagggaaacgaactggccctgccctccaaatatgtgaacttcctgtacctggccagccactatgagaagctgaagggctcccccgaggataatgagcagaaacagctgtttgtggaacagcacaagcactacctggacgagatcatcgagcagatcagcgagttctccaagagagtgatcctggccgacgctaatctggacaaagtgctgtccgcctacaacaagcaccgggataagcccatcagagagcaggccgagaatatcatccacctgtttaccctgaccaatctgggagcccctgccgccttcaagtactttgacaccaccatcgaccggaagaggtacaccagcaccaaagaggtgctggacgccaccctgatccaccagagcatcaccggcctgtacgagacacggatcgacctgtctcagctgggaggtgactctggaggatctagcggaggatcctctggcagcgagacaccaggaacaagcgagtcagcaacaccagagagcagtggcggcagcagcggcggcagcagcaccctaaatatagaagatgagtatcggctacatgagacctcaaaagagccagatgtttctctagggtccacatggctgtctgattttcctcaggcctgggcggaaaccgggggcatgggactggcagttcgccaagctcctctgatcatacctctgaaagcaacctctacccccgtgtccataaaacaataccccatgtcacaagaagccagactggggatcaagccccacatacagagactgttggaccagggaatactggtaccctgccagtccccctggaacacgcccctgctacccgttaagaaaccagggactaatgattataggcctgtccaggatctgagagaagtcaacaagcgggtggaagatatccaccccaccgtgcccaacccttacaacctcttgagcgggctcccaccgtcccaccagtggtacactgtgcttgatttaaaggatgcctttttctgcctgagactccaccccaccagtcagcctctcttcgcctttgagtggagagatccagagatgggaatctcaggacaattgacctggaccagactcccacagggtttcaaaaacagtcccaccctgtttaatgaggcactgcacagagacctagcagacttccggatccagcacccagacttgatcctgctacagtacgtggatgacttactgctggccgccacttctgagctagactgccaacaaggtactcgggccctgttacaaaccctagggaacctcgggtatcgggcctcggccaagaaagcccaaatttgccagaaacaggtcaagtatctggggtatcttctaaaagagggtcagagatggctgactgaggccagaaaagagactgtgatggggcagcctactcctaagacccctcgacaactaagggagttcctagggaaggcaggcttctgtcgcctcttcatccctgggtttgcagaaatggcagcccccctgtaccctctcaccaaaccggggactctgtttaattggggcccagaccaacaaaaggcctatcaagaaatcaagcaagctcttctaactgccccagccctggggttgccagatttgactaagccctttgaactctttgtcgacgagaagcagggctacgccaaaggtgtcctaacgcaaaaactgggaccttggcgtcggccggtggcctacctgtccaaaaagctagacccagtagcagctgggtggcccccttgcctacggatggtagcagccattgccgtactgacaaaggatgcaggcaagctaaccatgggacagccactagtcattctggccccccatgcagtagaggcactagtcaaacaaccccccgaccgctggctttccaacgcccggatgactcactatcaggccttgcttttggacacggaccgggtccagttcggaccggtggtagccctgggctcaaaaagaaccgccgacggcagcgaattcgagcccaagaagaagaggaaagtc

SEQ ID NO: 57 - DNA, 5634 bp, synthetic construct
  misc_feature 1..5634: note = Description of Artificial Sequence: Synthetic polynucleotide
  source 1..5634: mol_type = other DNA
gacaagaagtacagcatcggcctggacatcggcaccaactctgtgggctgggccgtgatcaccgacgagtacaaggtgcccagcaagaaattcaaggtgctgggcaacaccgaccggcacagcatcaagaagaacctgatcggagccctgctgttcgacagcggcgaaacagccgaggccacccggctgaagagaaccgccagaagaagatacaccagacggaagaaccggatctgctatctgcaagagatcttcagcaacgagatggccaaggtggacgacagcttcttccacagactggaagagtccttcctggtggaagaggataagaagcacgagcggcaccccatcttcggcaacatcgtggacgaggtggcctaccacgagaagtaccccaccatctaccacctgagaaagaaactggtggacagcaccgacaaggccgacctgcggctgatctatctggccctggcccacatgatcaagttccggggccacttcctgatcgagggcgacctgaaccccgacaacagcgacgtggacaagctgttcatccagctggtgcagacctacaaccagctgttcgaggaaaaccccatcaacgccagcggcgtggacgccaaggccatcctgtctgccagactgagcaagagcagacggctggaaaatctgatcgcccagctgcccggcgagaagaagaatggcctgttcggaaacctgattgccctgagcctgggcctgacccccaacttcaagagcaacttcgacctggccgaggatgccaaactgcagctgagcaaggacacctacgacgacgacctggacaacctgctggcccagatcggcgaccagtacgccgacctgtttctggccgccaagaacctgtccgacgccatcctgctgagcgacatcctgagagtgaacaccgagatcaccaaggcccccctgagcgcctctatgatcaagagatacgacgagcaccaccaggacctgaccctgctgaaagctctcgtgcggcagcagctgcctgagaagtacaaagagattttcttcgaccagagcaagaacggctacgccggctacattgacggcggagccagccaggaagagttctacaagttcatcaagcccatcctggaaaagatggacggcaccgaggaactgctcgtgaagctgaacagagaggacctgctgcggaagcagcggaccttcgacaacggcagcatcccccaccagatccacctgggagagctgcacgccattctgcggcggcaggaagatttttacccattcctgaaggacaaccgggaaaagatcgagaagatcctgaccttccgcatcccctactacgtgggccctctggccaggggaaacagcagattcgcctggatgaccagaaagagcgaggaaaccatcaccccctggaacttcgaggaagtggtggacaagggcgcttccgcccagagcttcatcgagcggatgaccaacttcgataagaacctgcccaacgagaaggtgctgcccaagcacagcctgctgtacgagtacttcaccgtgtataacgagctgaccaaagtgaaatacgtgaccgagggaatgagaaagcccgccttcctgagcggcgagcagaaaaaggccatcgtggacctgctgttcaagaccaaccggaaagtgaccgtgaagcagctgaaagaggactacttcaagaaaatcgagtgcttcgactccgtggaaatctccggcgtggaagatcggttcaacgcctccctgggcacataccacgatctgctgaaaattatcaaggacaaggacttcctggacaatgaggaaaacgaggacattctggaagatatcgtgctgaccctgacactgtttgaggacagagagatgatcgaggaacggctgaaaacctatgcccacctgttcgacgacaaagtgatgaagcagctgaagcggcggagatacaccggctggggcaggctgagccggaagctgatcaacggcatccgggacaagcagtccggcaagacaatcctggatttcctgaagtccgacggcttcgccaacagaaacttcatgcagctgatccacgacgacagcctgacctttaaagaggacatccagaaagcccaggtgtccggccagggcgatagcctgcacgagcacattgccaatctggccggcagccccgccattaagaagggcatcctgcagacagtgaaggtggtggacgagctcgtgaaagtgatgggccggcacaagcccgagaacatcgtgatcgaaatggccagagagaaccagaccacccagaagggacagaagaacagccgcgagagaatgaagcggatcgaagagggcatcaaagagctgggcagccagatcctgaaagaacaccccgtggaaaacacccagctgcagaacgagaagctgtacctgtactacctgcagaatgggcgggatatgtacgtggaccaggaactggacatcaaccggctgtccgactacgatgtggacgctatcgtgcctcagagctttctgaaggacgactccatcgacaacaaggtgctgaccagaagcgacaagaaccggggcaagagcgacaacgtgccctccgaagaggtcgtgaagaagatgaagaactactggcggcagctgctgaacgccaagctgattacccagagaaagttcgacaatctgaccaaggccgagagaggcggcctgagcgaactggataaggccggcttcatcaagagacagctggtggaaacccggcagatcacaaagcacgtggcacagatcctggactcccggatgaacactaagtacgacgagaatgacaagctgatccgggaagtgaaagtgatcaccctgaagtccaagctggtgtccgatttccggaaggatttccagttttacaaagtgcgcgagatcaacaactaccaccacgcccacgacgcctacctgaacgccgtcgtgggaaccgccctgatcaaaaagtaccctaagctggaaagcgagttcgtgtacggcgactacaaggtgtacgacgtgcggaagatgatcgccaagagcgagcaggaaatcggcaaggctaccgccaagtacttcttctacagcaacatcatgaactttttcaagaccgagattaccctggccaacggcgagatccggaagcggcctctgatcgagacaaacggcgaaaccggggagatcgtgtgggataagggccgggattttgccaccgtgcggaaagtgctgagcatgccccaagtgaatatcgtgaaaaagaccgaggtgcagacaggcggcttcagcaaagagtctatcctgcccaagaggaacagcgataagctgatcgccagaaagaaggactgggaccctaagaagtacggcggcttcgacagccccaccgtggcctattctgtgctggtggtggccaaagtggaaaagggcaagtccaagaaactgaagagtgtgaaagagctgctggggatcaccatcatggaaagaagcagcttcgagaagaatcccatcgactttctggaagccaagggctacaaagaagtgaaaaaggacctgatcatcaagctgcctaagtactccctgttcgagctggaaaacggccggaagagaatgctggcctctgccggcgaactgcagaagggaaacgaactggccctgccctccaaatatgtgaacttcctgtacctggccagccactatgagaagctgaagggctcccccgaggataatgagcagaaacagctgtttgtggaacagcacaagcactacctggacgagatcatcgagcagatcagcgagttctccaagagagtgatcctggccgacgctaatctggacaaagtgctgtccgcctacaacaagcaccgggataagcccatcagagagcaggccgagaatatcatccacctgtttaccctgaccaatctgggagcccctgccgccttcaagtactttgacaccaccatcgaccggaagaggtacaccagcaccaaagaggtgctggacgccaccctgatccaccagagcatcaccggcctgtacgagacacggatcgacctgtctcagctgggaggtgactctggaggatctagcggaggatcctctggcagcgagacaccaggaacaagcgagtcagcaacaccagagagcagtggcggcagcagcggcggcagcagcaccctaaatatagaagatgagtatcggctacatgagacctcaaaagagccagatgtttctctagggtccacatggctgtctgattttcctcaggcctgggcggaaaccgggggcatgggactggcagttcgccaagctcctctgatcatacctctgaaagcaacctctacccccgtgtccataaaacaataccccatgtcacaagaagccagactggggatcaagccccacatacagagactgttggaccagggaatactggtaccctgccagtccccctggaacacgcccctgctacccgttaagaaaccagggactaatgattataggcctgtccaggatctgagagaagtcaacaagcgggtggaagatatccaccccaccgtgcccaacccttacaacctcttgagcgggctcccaccgtcccaccagtggtacactgtgcttgatttaaaggatgcctttttctgcctgagactccaccccaccagtcagcctctcttcgcctttgagtggagagatccagagatgggaatctcaggacaattgacctggaccagactcccacagggtttcaaaaacagtcccaccctgtttaatgaggcactgcacagagacctagcagacttccggatccagcacccagacttgatcctgctacagtacgtggatgacttactgctggccgccacttctgagctagactgccaacaaggtactcgggccctgttacaaaccctagggaacctcgggtatcgggcctcggccaagaaagcccaaatttgccagaaacaggtcaagtatctggggtatcttctaaaagagggtcagagatggctgactgaggccagaaaagagactgtgatggggcagcctactcctaagacccctcgacaactaagggagttcctagggaaggcaggcttctgtcgcctcttcatccctgggtttgcagaaatggcagcccccctgtaccctctcaccaaaccggggactctgtttaattggggcccagaccaacaaaaggcctatcaagaaatcaagcaagctcttctaactgccccagccctggggttgccagatttgactaagccctttgaactctttgtcgacgagaagcagggctacgccaaaggtgtcctaacgcaaaaactgggaccttggcgtcggccggtggcctacctgtccaaaaagctagacccagtagcagctgggtggcccccttgcctacggatggtagcagccattgccgtactgacaaaggatgcaggcaagctaaccatgggacagccactagtcattctggccccccatgcagtagaggcactagtcaaacaaccccccgaccgctggctttccaacgcccggatgactcactatcaggccttgcttttggacacggaccgggtccagttcggaccggtggtagccctg

SEQ ID NO: 58 - RNA, 5634 nt, synthetic construct
  misc_feature 1..5634: note = Description of Artificial Sequence: Synthetic polynucleotide
  source 1..5634: mol_type = other RNA
gacaagaagtacagcatcggcctggacatcggcaccaactctgtgggctgggccgtgatcaccgacgagtacaaggtgcccagcaagaaattcaaggtgctgggcaacaccgaccggcacagcatcaagaagaacctgatcggagccctgctgttcgacagcggcgaaacagccgaggccacccggctgaagagaaccgccagaagaagatacaccagacggaagaaccggatctgctatctgcaagagatcttcagcaacgagatggccaaggtggacgacagcttcttccacagactggaagagtccttcctggtggaagaggataagaagcacgagcggcaccccatcttcggcaacatcgtggacgaggtggcctaccacgagaagtaccccaccatctaccacctgagaaagaaactggtggacagcaccgacaaggccgacctgcggctgatctatctggccctggcccacatgatcaagttccggggccacttcctgatcgagggcgacctgaaccccgacaacagcgacgtggacaagctgttcatccagctggtgcagacctacaaccagctgttcgaggaaaaccccatcaacgccagcggcgtggacgccaaggccatcctgtctgccagactgagcaagagcagacggctggaaaatctgatcgcccagctgcccggcgagaagaagaatggcctgttcggaaacctgattgccctgagcctgggcctgacccccaacttcaagagcaacttcgacctggccgaggatgccaaactgcagctgagcaaggacacctacgacgacgacctggacaacctgctggcccagatcggcgaccagtacgccgacctgtttctggccgccaagaacctgtccgacgccatcctgctgagcgacatcctgagagtgaacaccgagatcaccaaggcccccctgagcgcctctatgatcaagagatacgacgagcaccaccaggacctgaccctgctgaaagctctcgtgcggcagcagctgcctgagaagtacaaagagattttcttcgaccagagcaagaacggctacgccggctacattgacggcggagccagccaggaagagttctacaagttcatcaagcccatcctggaaaagatggacggcaccgaggaactgctcgtgaagctgaacagagaggacctgctgcggaagcagcggaccttcgacaacggcagcatcccccaccagatccacctgggagagctgcacgccattctgcggcggcaggaagatttttacccattcctgaaggacaaccgggaaaagatcgagaagatcctgaccttccgcatcccctactacgtgggccctctggccaggggaaacagcagattcgcctggatgaccagaaagagcgaggaaaccatcaccccctggaacttcgaggaagtggtggacaagggcgcttccgcccagagcttcatcgagcggatgaccaacttcgataagaacctgcccaacgagaaggtgctgcccaagcacagcctgctgtacgagtacttcaccgtgtataacgagctgaccaaagtgaaatacgtgaccgagggaatgagaaagcccgccttcctgagcggcgagcagaaaaaggccatcgtggacctgctgttcaagaccaaccggaaagtgaccgtgaagcagctgaaagaggactacttcaagaaaatcgagtgcttcgactccgtggaaatctccggcgtggaagatcggttcaacgcctccctgggcacataccacgatctgctgaaaattatcaaggacaaggacttcctggacaatgaggaaaacgaggacattctggaagatatcgtgctgaccctgacactgtttgaggacagagagatgatcgaggaacggctgaaaacctatgcccacctgttcgacgacaaagtgatgaagcagctgaagcggcggagatacaccggctggggcaggctgagccggaagctgatcaacggcatccgggacaagcagtccggcaagacaatcctggatttcctgaagtccgacggcttcgccaacagaaacttcatgcagctgatccacgacgacagcctgacctttaaagaggacatccagaaagcccaggtgtccggccagggcgatagcctgcacgagcacattgccaatctggccggcagccccgccattaagaagggcatcctgcagacagtgaaggtggtggacgagctcgtgaaagtgatgggccggcacaagcccgagaacatcgtgatcgaaatggccagagagaaccagaccacccagaagggacagaagaacagccgcgagagaatgaagcggatcgaagagggcatcaaagagctgggcagccagatcctgaaagaacaccccgtggaaaacacccagctgcagaacgagaagctgtacctgtactacctgcagaatgggcgggatatgtacgtggaccaggaactggacatcaaccggctgtccgactacgatgtggacgctatcgtgcctcagagctttctgaaggacgactccatcgacaacaaggtgctgaccagaagcgacaagaaccggggcaagagcgacaacgtgccctccgaagaggtcgtgaagaagatgaagaactactggcggcagctgctgaacgccaagctgattacccagagaaagttcgacaatctgaccaaggccgagagaggcggcctgagcgaactggataaggccggcttcatcaagagacagctggtggaaacccggcagatcacaaagcacgtggcacagatcctggactcccggatgaacactaagtacgacgagaatgacaagctgatccgggaagtgaaagtgatcaccctgaagtccaagctggtgtccgatttccggaaggatttccagttttacaaagtgcgcgagatcaacaactaccaccacgcccacgacgcctacctgaacgccgtcgtgggaaccgccctgatcaaaaagtaccctaagctggaaagcgagttcgtgtacggcgactacaaggtgtacgacgtgcggaagatgatcgccaagagcgagcaggaaatcggcaaggctaccgccaagtacttcttctacagcaacatcatgaactttttcaagaccgagattaccctggccaacggcgagatccggaagcggcctctgatcgagacaaacggcgaaaccggggagatcgtgtgggataagggccgggattttgccaccgtgcggaaagtgctgagcatgccccaagtgaatatcgtgaaaaagaccgaggtgcagacaggcggcttcagcaaagagtctatcctgcccaagaggaacagcgataagctgatcgccagaaagaaggactgggaccctaagaagtacggcggcttcgacagccccaccgtggcctattctgtgctggtggtggccaaagtggaaaagggcaagtccaagaaactgaagagtgtgaaagagctgctggggatcaccatcatggaaagaagcagcttcgagaagaatcccatcgactttctggaagccaagggctacaaagaagtgaaaaaggacctgatcatcaagctgcctaagtactccctgttcgagctggaaaacggccggaagagaatgctggcctctgccggcgaactgcagaagggaaacgaactggccctgccctccaaatatgtgaacttcctgtacctggccagccactatgagaagctgaagggctcccccgaggataatgagcagaaacagctgtttgtggaacagcacaagcactacctggacgagatcatcgagcagatcagcgagttctccaagagagtgatcctggccgacgctaatctggacaaagtgctgtccgcctacaacaagcaccgggataagcccatcagagagcaggccgagaatatcatccacctgtttaccctgaccaatctgggagcccctgccgccttcaagtactttgacaccaccatcgaccggaagaggtacaccagcaccaaagaggtgctggacgccaccctgatccaccagagcatcaccggcctgtacgagacacggatcgacctgtctcagctgggaggtgactctggaggatctagcggaggatcctctggcagcgagacaccaggaacaagcgagtcagcaacaccagagagcagtggcggcagcagcggcggcagcagcaccctaaatatagaagatgagtatcggctacatgagacctcaaaagagccagatgtttctctagggtccacatggctgtctgattttcctcaggcctgggcggaaaccgggggcatgggactggcagttcgccaagctcctctgatcatacctctgaaagcaacctctacccccgtgtccataaaacaataccccatgtcacaagaagccagactggggatcaagccccacatacagagactgttggaccagggaatactggtaccctgccagtccccctggaacacgcccctgctacccgttaagaaaccagggactaatgattataggcctgtccaggatctgagagaagtcaacaagcgggtggaagatatccaccccaccgtgcccaacccttacaacctcttgagcgggctcccaccgtcccaccagtggtacactgtgcttgatttaaaggatgcctttttctgcctgagactccaccccaccagtcagcctctcttcgcctttgagtggagagatccagagatgggaatctcaggacaattgacctggaccagactcccacagggtttcaaaaacagtcccaccctgtttaatgaggcactgcacagagacctagcagacttccggatccagcacccagacttgatcctgctacagtacgtggatgacttactgctggccgccacttctgagctagactgccaacaaggtactcgggccctgttacaaaccctagggaacctcgggtatcgggcctcggccaagaaagcccaaatttgccagaaacaggtcaagtatctggggtatcttctaaaagagggtcagagatggctgactgaggccagaaaagagactgtgatggggcagcctactcctaagacccctcgacaactaagggagttcctagggaaggcaggcttctgtcgcctcttcatccctgggtttgcagaaatggcagcccccctgtaccctctcaccaaaccggggactctgtttaattggggcccagaccaacaaaaggcctatcaagaaatcaagcaagctcttctaactgccccagccctggggttgccagatttgactaagccctttgaactctttgtcgacgagaagcagggctacgccaaaggtgtcctaacgcaaaaactgggaccttggcgtcggccggtggcctacctgtccaaaaagctagacccagtagcagctgggtggcccccttgcctacggatggtagcagccattgccgtactgacaaaggatgcaggcaagctaaccatgggacagccactagtcattctggccccccatgcagtagaggcactagtcaaacaaccccccgaccgctggctttccaacgcccggatgactcactatcaggccttgcttttggacacggaccgggtccagttcggaccggtggtagccctg

SEQ ID NO: 59 - DNA, 1434 bp, synthetic construct
  misc_feature 1..1434: note = Description of Artificial Sequence: Synthetic polynucleotide
  source 1..1434: mol_type = other DNA
accctaaatatagaagatgagtatcggctacatgagacctcaaaagagccagatgtttctctagggtccacatggctgtctgattttcctcaggcctgggcggaaaccgggggcatgggactggcagttcgccaagctcctctgatcatacctctgaaagcaacctctacccccgtgtccataaaacaataccccatgtcacaagaagccagactggggatcaagccccacatacagagactgttggaccagggaatactggtaccctgccagtccccctggaacacgcccctgctacccgttaagaaaccagggactaatgattataggcctgtccaggatctgagagaagtcaacaagcgggtggaagatatccaccccaccgtgcccaacccttacaacctcttgagcgggctcccaccgtcccaccagtggtacactgtgcttgatttaaaggatgcctttttctgcctgagactccaccccaccagtcagcctctcttcgcctttgagtggagagatccagagatgggaatctcaggacaattgacctggaccagactcccacagggtttcaaaaacagtcccaccctgtttaatgaggcactgcacagagacctagcagacttccggatccagcacccagacttgatcctgctacagtacgtggatgacttactgctggccgccacttctgagctagactgccaacaaggtactcgggccctgttacaaaccctagggaacctcgggtatcgggcctcggccaagaaagcccaaatttgccagaaacaggtcaagtatctggggtatcttctaaaagagggtcagagatggctgactgaggccagaaaagagactgtgatggggcagcctactcctaagacccctcgacaactaagggagttcctagggaaggcaggcttctgtcgcctcttcatccctgggtttgcagaaatggcagcccccctgtaccctctcaccaaaccggggactctgtttaattggggcccagaccaacaaaaggcctatcaagaaatcaagcaagctcttctaactgccccagccctggggttgccagatttgactaagccctttgaactctttgtcgacgagaagcagggctacgccaaaggtgtcctaacgcaaaaactgggaccttggcgtcggccggtggcctacctgtccaaaaagctagacccagtagcagctgggtggcccccttgcctacggatggtagcagccattgccgtactgacaaaggatgcaggcaagctaaccatgggacagccactagtcattctggccccccatgcagtagaggcactagtcaaacaaccccccgaccgctggctttccaacgcccggatgactcactatcaggccttgcttttggacacggaccgggtccagttcggaccggtggtagccctg

SEQ ID NO: 60 - RNA, 1434 nt, synthetic construct
  misc_feature 1..1434: note = Description of Artificial Sequence: Synthetic polynucleotide
  source 1..1434: mol_type = other RNA
accctaaatatagaagatgagtatcggctacatgagacctcaaaagagccagatgtttctctagggtccacatggctgtctgattttcctcaggcctgggcggaaaccgggggcatgggactggcagttcgccaagctcctctgatcatacctctgaaagcaacctctacccccgtgtccataaaacaataccccatgtcacaagaagccagactggggatcaagccccacatacagagactgttggaccagggaatactggtaccctgccagtccccctggaacacgcccctgctacccgttaagaaaccagggactaatgattataggcctgtccaggatctgagagaagtcaacaagcgggtggaagatatccaccccaccgtgcccaacccttacaacctcttgagcgggctcccaccgtcccaccagtggtacactgtgcttgatttaaaggatgcctttttctgcctgagactccaccccaccagtcagcctctcttcgcctttgagtggagagatccagagatgggaatctcaggacaattgacctggaccagactcccacagggtttcaaaaacagtcccaccctgtttaatgaggcactgcacagagacctagcagacttccggatccagcacccagacttgatcctgctacagtacgtggatgacttactgctggccgccacttctgagctagactgccaacaaggtactcgggccctgttacaaaccctagggaacctcgggtatcgggcctcggccaagaaagcccaaatttgccagaaacaggtcaagtatctggggtatcttctaaaagagggtcagagatggctgactgaggccagaaaagagactgtgatggggcagcctactcctaagacccctcgacaactaagggagttcctagggaaggcaggcttctgtcgcctcttcatccctgggtttgcagaaatggcagcccccctgtaccctctcaccaaaccggggactctgtttaattggggcccagaccaacaaaaggcctatcaagaaatcaagcaagctcttctaactgccccagccctggggttgccagatttgactaagccctttgaactctttgtcgacgagaagcagggctacgccaaaggtgtcctaacgcaaaaactgggaccttggcgtcggccggtggcctacctgtccaaaaagctagacccagtagcagctgggtggcccccttgcctacggatggtagcagccattgccgtactgacaaaggatgcaggcaagctaaccatgggacagccactagtcattctggccccccatgcagtagaggcactagtcaaacaaccccccgaccgctggctttccaacgcccggatgactcactatcaggccttgcttttggacacggaccgggtccagttcggaccggtggtagccctg

SEQ ID NO: 61 - protein, 1942 aa, synthetic construct
  REGION 1..1942: note = Description of Artificial Sequence: Synthetic polypeptide
MKRTADGSEFESPKKKRKVDKKYSIGLDIGTNSVGWAVITDEYKVPSKKFKVLGNTDRHSIKKNLIGALLFDSGETAEATRLKRTARRRYTRRKNRICYLQEIFSNEMAKVDDSFFHRLEESFLVEEDKKHERHPIFGNIVDEVAYHEKYPTIYHLRKKLVDSTDKADLRLIYLALAHMIKFRGHFLIEGDLNPDNSDVDKLFIQLVQTYNQLFEENPINASGVDAKAILSARLSKSRRLENLIAQLPGEKKNGLFGNLIALSLGLTPNFKSNFDLAEDAKLQLSKDTYDDDLDNLLAQIGDQYADLFLAAKNLSDAILLSDILRVNTEITKAPLSASMIKRYDEHHQDLTLLKALVRQQLPEKYKEIFFDQSKNGYAGYIDGGASQEEFYKFIKPILEKMDGTEELLVKLNREDLLRKQRTFDNGSIPHQIHLGELHAILRRQEDFYPFLKDNREKIEKILTFRIPYYVGPLARGNSRFAWMTRKSEETITPWNFEEVVDKGASAQSFIERMTNFDKNLPNEKVLPKHSLLYEYFTVYNELTKVKYVTEGMRKPAFLSGEQKKAIVDLLFKTNRKVTVKQLKEDYFKKIECFDSVEISGVEDRFNASLGTYHDLLKIIKDKDFLDNEENEDILEDIVLTLTLFEDREMIEERLKTYAHLFDDKVMKQLKRRRYTGWGRLSRKLINGIRDKQSGKTILDFLKSDGFANRNFMQLIHDDSLTFKEDIQKAQVSGQGDSLHEHIANLAGSPAIKKGILQTVKVVDELVKVMGRHKPENIVIEMARENQTTQKGQKNSRERMKRIEEGIKELGSQILKEHPVENTQLQNEKLYLYYLQNGRDMYVDQELDINRLSDYDVDAIVPQSFLKDDSIDNKVLTRSDKNRGKSDNVPSEEVVKKMKNYWRQLLNAKLITQRKFDNLTKAERGGLSELDKAGFIKRQLVETRQITKHVAQILDSRMNTKYDENDKLIREVKVITLKSKLVSDFRKDFQFYKVREINNYHHAHDAYLNAVVGTALIKKYPKLESEFVYGDYKVYDVRKMIAKSEQEIGKATAKYFFYSNIMNFFKTEITLANGEIRKRPLIETNGETGEIVWDKGRDFATVRKVLSMPQVNIVKKTEVQTGGFSKESILPKRNSDKLIARKKDWDPKKYGGFDSPTVAYSVLVVAKVEKGKSKKLKSVKELLGITIMERSSFEKNPIDFLEAKGYKEVKKDLIIKLPKYSLFELENGRKRMLASAGELQKGNELALPSKYVNFLYLASHYEKLKGSPEDNEQKQLFVEQHKHYLDEIIEQISEFSKRVILADANLDKVLSAYNKHRDKPIREQAENIIHLFTLTNLGAPAAFKYFDTTIDRKRYTSTKEVLDATLIHQSITGLYETRIDLSQLGGDSGGSSGGSSGSETPGTSESATPESSGGSSGGSSTLNIEDEYRLHETSKEPDVSLGSTWLSDFPQAWAETGGMGLAVRQAPLIIPLKATSTPVSIKQYPMSQEARLGIKPHIQRLLDQGILVPCQSPWNTPLLPVKKPGTNDYRPVQDLREVNKRVEDIHPTVPNPYNLLSGLPPSHQWYTVLDLKDAFFCLRLHPTSQPLFAFEWRDPEMGISGQLTWTRLPQGFKNSPTLFNEALHRDLADFRIQHPDLILLQYVDDLLLAATSELDCQQGTRALLQTLGNLGYRASAKKAQICQKQVKYLGYLLKEGQRWLTEARKETVMGQPTPKTPRQLREFLGKAGFCRLFIPGFAEMAAPLYPLTKPGTLFNWGPDQQKAYQEIKQALLTAPALGLPDLTKPFELFVDEKQGYAKGVLTQKLGPWRRPVAYLSKKLDPVAAGWPPCLRMVAAIAVLTKDAGKLTMGQPLVIKAPHAVEALVKQPPDRWLSNARMTHYQALLLDTDRVQFGPVVALNPATLLPLPEEGLQHNCLDILAEAHGGSKRTADGSEFEPKKKRKV

SEQ ID NO: 62 - protein, 1904 aa, synthetic construct
  REGION 1..1904: note = Description of Artificial Sequence: Synthetic polypeptide
DKKYSIGLDIGTNSVGWAVITDEYKVPSKKFKVLGNTDRHSIKKNLIGALLFDSGETAEATRLKRTARRRYTRRKNRICYLQEIFSNEMAKVDDSFFHRLEESFLVEEDKKHERHPIFGNIVDEVAYHEKYPTIYHLRKKLVDSTDKADLRLIYLALAHMIKFRGHFLIEGDLNPDNSDVDKLFIQLVQTYNQLFEENPINASGVDAKAILSARLSKSRRLENLIAQLPGEKKNGLFGNLIALSLGLTPNFKSNFDLAEDAKLQLSKDTYDDDLDNLLAQIGDQYADLFLAAKNLSDAILLSDILRVNTEITKAPLSASMIKRYDEHHQDLTLLKALVRQQLPEKYKEIFFDQSKNGYAGYIDGGASQEEFYKFIKPILEKMDGTEELLVKLNREDLLRKQRTFDNGSIPHQIHLGELHAILRRQEDFYPFLKDNREKIEKILTFRIPYYVGPLARGNSRFAWMTRKSEETITPWNFEEVVDKGASAQSFIERMTNFDKNLPNEKVLPKHSLLYEYFTVYNELTKVKYVTEGMRKPAFLSGEQKKAIVDLLFKTNRKVTVKQLKEDYFKKIECFDSVEISGVEDRFNASLGTYHDLLKIIKDKDFLDNEENEDILEDIVLTLTLFEDREMIEERLKTYAHLFDDKVMKQLKRRRYTGWGRLSRKLINGIRDKQSGKTILDFLKSDGFANRNFMQLIHDDSLTFKEDIQKAQVSGQGDSLHEHIANLAGSPAIKKGILQTVKVVDELVKVMGRHKPENIVIEMARENQTTQKGQKNSRERMKRIEEGIKELGSQILKEHPVENTQLQNEKLYLYYLQNGRDMYVDQELDINRLSDYDVDAIVPQSFLKDDSIDNKVLTRSDKNRGKSDNVPSEEVVKKMKNYWRQLLNAKLITQRKFDNLTKAERGGLSELDKAGFIKRQLVETRQITKHVAQILDSRMNTKYDENDKLIREVKVITLKSKLVSDFRKDFQFYKVREINNYHHAHDAYLNAVVGTALIKKYPKLESEFVYGDYKVYDVRKMIAKSEQEIGKATAKYFFYSNIMNFFKTEITLANGEIRKRPLIETNGETGEIVWDKGRDFATVRKVLSMPQVNIVKKTEVQTGGFSKESILPKRNSDKLIARKKDWDPKKYGGFDSPTVAYSVLVVAKVEKGKSKKLKSVKELLGITIMERSSFEKNPIDFLEAKGYKEVKKDLIIKLPKYSLFELENGRKRMLASAGELQKGNELALPSKYVNFLYLASHYEKLKGSPEDNEQKQLFVEQHKHYLDEIIEQISEFSKRVILADANLDKVLSAYNKHRDKPIREQAENIIHLFTLTNLGAPAAFKYFDTTIDRKRYTSTKEVLDATLIHQSITGLYETRIDLSQLGGDSGGSSGGSSGSETPGTSESATPESSGGSSGGSSTLNIEDEYRLHETSKEPDVSLGSTWLSDFPQAWAETGGMGLAVRQAPLIIPLKATSTPVSIKQYPMSQEARLGIKPHIQRLLDQGILVPCQSPWNTPLLPVKKPGTNDYRPVQDLREVNKRVEDIHPTVPNPYNLLSGLPPSHQWYTVLDLKDAFFCLRLHPTSQPLFAFEWRDPEMGISGQLTWTRLPQGFKNSPTLFNEALHRDLADFRIQHPDLILLQYVDDLLLAATSELDCQQGTRALLQTLGNLGYRASAKKAQICQKQVKYLGYLLKEGQRWLTEARKETVMGQPTPKTPRQLREFLGKAGFCRLFIPGFAEMAAPLYPLTKPGTLFNWGPDQQKAYQEIKQALLTAPALGLPDLTKPFELFVDEKQGYAKGVLTQKLGPWRRPVAYLSKKLDPVAAGWPPCLRMVAAIAVLTKDAGKLTMGQPLVIKAPHAVEALVKQPPDRWLSNARMTHYQALLLDTDRVQFGPVVALNPATLLPLPEEGLQHNCLDILAEAHG

SEQ ID NO: 63 - protein, 504 aa, synthetic construct
  REGION 1..504: note = Description of Artificial Sequence: Synthetic polypeptide
TLNIEDEYRLHETSKEPDVSLGSTWLSDFPQAWAETGGMGLAVRQAPLIIPLKATSTPVSIKQYPMSQEARLGIKPHIQRLLDQGILVPCQSPWNTPLLPVKKPGTNDYRPVQDLREVNKRVEDIHPTVPNPYNLLSGLPPSHQWYTVLDLKDAFFCLRLHPTSQPLFAFEWRDPEMGISGQLTWTRLPQGFKNSPTLFNEALHRDLADFRIQHPDLILLQYVDDLLLAATSELDCQQGTRALLQTLGNLGYRASAKKAQICQKQVKYLGYLLKEGQRWLTEARKETVMGQPTPKTPRQLREFLGKAGFCRLFIPGFAEMAAPLYPLTKPGTLFNWGPDQQKAYQEIKQALLTAPALGLPDLTKPFELFVDEKQGYAKGVLTQKLGPWRRPVAYLSKKLDPVAAGWPPCLRMVAAIAVLTKDAGKLTMGQPLVIKAPHAVEALVKQPPDRWLSNARMTHYQALLLDTDRVQFGPVVALNPATLLPLPEEGLQHNCLDILAEAHG

SEQ ID NO: 64 - DNA, 5826 bp, synthetic construct
  misc_feature 1..5826: note = Description of Artificial Sequence: Synthetic polynucleotide
  source 1..5826: mol_type = other DNA
atgaaacgtacagccgacggaagcgagttcgagtcaccaaagaagaagcggaaagtcgacaagaagtacagcatcggcctggacatcggcaccaactctgtgggctgggccgtgatcaccgacgagtacaaggtgcccagcaagaaattcaaggtgctgggcaacaccgaccggcacagcatcaagaagaacctgatcggagccctgctgttcgacagcggcgaaacagccgaggccacccggctgaagagaaccgccagaagaagatacaccagacggaagaaccggatctgctatctgcaagagatcttcagcaacgagatggccaaggtggacgacagcttcttccacagactggaagagtccttcctggtggaagaggataagaagcacgagcggcaccccatcttcggcaacatcgtggacgaggtggcctaccacgagaagtaccccaccatctaccacctgagaaagaaactggtggacagcaccgacaaggccgacctgcggctgatctatctggccctggcccacatgatcaagttccggggccacttcctgatcgagggcgacctgaaccccgacaacagcgacgtggacaagctgttcatccagctggtgcagacctacaaccagctgttcgaggaaaaccccatcaacgccagcggcgtggacgccaaggccatcctgtctgccagactgagcaagagcagacggctggaaaatctgatcgcccagctgcccggcgagaagaagaatggcctgttcggaaacctgattgccctgagcctgggcctgacccccaacttcaagagcaacttcgacctggccgaggatgccaaactgcagctgagcaaggacacctacgacgacgacctggacaacctgctggcccagatcggcgaccagtacgccgacctgtttctggccgccaagaacctgtccgacgccatcctgctgagcgacatcctgagagtgaacaccgagatcaccaaggcccccctgagcgcctctatgatcaagagatacgacgagcaccaccaggacctgaccctgctgaaagctctcgtgcggcagcagctgcctgagaagtacaaagagattttcttcgaccagagcaagaacggctacgccggctacattgacggcggagccagccaggaagagttctacaagttcatcaagcccatcctggaaaagatggacggcaccgaggaactgctcgtgaagctgaacagagaggacctgctgcggaagcagcggaccttcgacaacggcagcatcccccaccagatccacctgggagagctgcacgccattctgcggcggcaggaagatttttacccattcctgaaggacaaccgggaaaagatcgagaagatcctgaccttccgcatcccctactacgtgggccctctggccaggggaaacagcagattcgcctggatgaccagaaagagcgaggaaaccatcaccccctggaacttcgaggaagtggtggacaagggcgcttccgcccagagcttcatcgagcggatgaccaacttcgataagaacctgcccaacgagaaggtgctgcccaagcacagcctgctgtacgagtacttcaccgtgtataacgagctgaccaaagtgaaatacgtgaccgagggaatgagaaagcccgccttcctgagcggcgagcagaaaaaggccatcgtggacctgctgttcaagaccaaccggaaagtgaccgtgaagcagctgaaagaggactacttcaagaaaatcgagtgcttcgactccgtggaaatctccggcgtggaagatcggttcaacgcctccctgggcacataccacgatctgctgaaaattatcaaggacaaggacttcctggacaatgaggaaaacgaggacattctggaagatatcgtgctgaccctgacactgtttgaggacagagagatgatcgaggaacggctgaaaacctatgcccacctgttcgacgacaaagtgatgaagcagctgaagcggcggagatacaccggctggggcaggctgagccggaagctgatcaacggcatccgggacaagcagtccggcaagacaatcctggatttcctgaagtccgacggcttcgccaacagaaacttcatgcagctgatccacgacgacagcctgacctttaaagaggacatccagaaagcccaggtgtccggccagggcgatagcctgcacgagcacattgccaatctggccggcagccccgccattaagaagggcatcctgcagacagtgaaggtggtggacgagctcgtgaaagtgatgggccggcacaagcccgagaacatcgtgatcgaaatggccagagagaaccagaccacccagaagggacagaagaacagccgcgagagaatgaagcggatcgaagagggcatcaaagagctgggcagccagatcctgaaagaacaccccgtggaaaacacccagctgcagaacgagaagctgtacctgtactacctgcagaatgggcgggatatgtacgtggaccaggaactggacatcaaccggctgtccgactacgatgtggacgctatcgtgcctcagagctttctgaaggacgactccatcgacaacaaggtgctgaccagaagcgacaagaaccggggcaagagcgacaacgtgccctccgaagaggtcgtgaagaagatgaagaactactggcggcagctgctgaacgccaagctgattacccagagaaagttcgacaatctgaccaaggccgagagaggcggcctgagcgaactggataaggccggcttcatcaagagacagctggtggaaacccggcagatcacaaagcacgtggcacagatcctggactcccggatgaacactaagtacgacgagaatgacaagctgatccgggaagtgaaagtgatcaccctgaagtccaagctggtgtccgatttccggaaggatttccagttttacaaagtgcgcgagatcaacaactaccaccacgcccacgacgcctacctgaacgccgtcgtgggaaccgccctgatcaaaaagtaccctaagctggaaagcgagttcgtgtacggcgactacaaggtgtacgacgtgcggaagatgatcgccaagagcgagcaggaaatcggcaaggctaccgccaagtacttcttctacagcaacatcatgaactttttcaagaccgagattaccctggccaacggcgagatccggaagcggcctctgatcgagacaaacggcgaaaccggggagatcgtgtgggataagggccgggattttgccaccgtgcggaaagtgctgagcatgccccaagtgaatatcgtgaaaaagaccgaggtgcagacaggcggcttcagcaaagagtctatcctgcccaagaggaacagcgataagctgatcgccagaaagaaggactgggaccctaagaagtacggcggcttcgacagccccaccgtggcctattctgtgctggtggtggccaaagtggaaaagggcaagtccaagaaactgaagagtgtgaaagagctgctggggatcaccatcatggaaagaagcagcttcgagaagaatcccatcgactttctggaagccaagggctacaaagaagtgaaaaaggacctgatcatcaagctgcctaagtactccctgttcgagctggaaaacggccggaagagaatgctggcctctgccggcgaactgcagaagggaaacgaactggccctgccctccaaatatgtgaacttcctgtacctggccagccactatgagaagctgaagggctcccccgaggataatgagcagaaacagctgtttgtggaacagcacaagcactacctggacgagatcatcgagcagatcagcgagttctccaagagagtgatcctggccgacgctaatctggacaaagtgctgtccgcctacaacaagcaccgggataagcccatcagagagcaggccgagaatatcatccacctgtttaccctgaccaatctgggagcccctgccgccttcaagtactttgacaccaccatcgaccggaagaggtacaccagcaccaaagaggtgctggacgccaccctgatccaccagagcatcaccggcctgtacgagacacggatcgacctgtctcagctgggaggtgactctggaggatctagcggaggatcctctggcagcgagacaccaggaacaagcgagtcagcaacaccagagagcagtggcggcagcagcggcggcagcagcaccctaaatatagaagatgagtatcggctacatgagacctcaaaagagccagatgtttctctagggtccacatggctgtctgattttcctcaggcctgggcggaaaccgggggcatgggactggcagttcgccaagctcctctgatcatacctctgaaagcaacctctacccccgtgtccataaaacaataccccatgtcacaagaagccagactggggatcaagccccacatacagagactgttggaccagggaatactggtaccctgccagtccccctggaacacgcccctgctacccgttaagaaaccagggactaatgattataggcctgtccaggatctgagagaagtcaacaagcgggtggaagatatccaccccaccgtgcccaacccttacaacctcttgagcgggctcccaccgtcccaccagtggtacactgtgcttgatttaaaggatgcctttttctgcctgagactccaccccaccagtcagcctctcttcgcctttgagtggagagatccagagatgggaatctcaggacaattgacctggaccagactcccacagggtttcaaaaacagtcccaccctgtttaatgaggcactgcacagagacctagcagacttccggatccagcacccagacttgatcctgctacagtacgtggatgacttactgctggccgccacttctgagctagactgccaacaaggtactcgggccctgttacaaaccctagggaacctcgggtatcgggcctcggccaagaaagcccaaatttgccagaaacaggtcaagtatctggggtatcttctaaaagagggtcagagatggctgactgaggccagaaaagagactgtgatggggcagcctactcctaagacccctcgacaactaagggagttcctagggaaggcaggcttctgtcgcctcttcatccctgggtttgcagaaatggcagcccccctgtaccctctcaccaaaccggggactctgtttaattggggcccagaccaacaaaaggcctatcaagaaatcaagcaagctcttctaactgccccagccctggggttgccagatttgactaagccctttgaactctttgtcgacgagaagcagggctacgccaaaggtgtcctaacgcaaaaactgggaccttggcgtcggccggtggcctacctgtccaaaaagctagacccagtagcagctgggtggcccccttgcctacggatggtagcagccattgccgtactgacaaaggatgcaggcaagctaaccatgggacagccactagtcattaaggccccccatgcagtagaggcactagtcaaacaaccccccgaccgctggctttccaacgcccggatgactcactatcaggccttgcttttggacacggaccgggtccagttcggaccggtggtagccctgaacccggctacgctgctcccactgcctgaggaagggctgcaacacaactgccttgatatcctggccgaagcccacggaggctcaaaaagaaccgccgacggcagcgaattcgagcccaagaagaagaggaaagtc

SEQ ID NO: 65 - RNA, 5826 nt, synthetic construct
  misc_feature 1..5826: note = Description of Artificial Sequence: Synthetic polynucleotide
  source 1..5826: mol_type = other RNA
atgaaacgtacagccgacggaagcgagttcgagtcaccaaagaagaagcggaaagtcgacaagaagtacagcatcggcctggacatcggcaccaactctgtgggctgggccgtgatcaccgacgagtacaaggtgcccagcaagaaattcaaggtgctgggcaacaccgaccggcacagcatcaagaagaacctgatcggagccctgctgttcgacagcggcgaaacagccgaggccacccggctgaagagaaccgccagaagaagatacaccagacggaagaaccggatctgctatctgcaagagatcttcagcaacgagatggccaaggtggacgacagcttcttccacagactggaagagtccttcctggtggaagaggataagaagcacgagcggcaccccatcttcggcaacatcgtggacgaggtggcctaccacgagaagtaccccaccatctaccacctgagaaagaaactggtggacagcaccgacaaggccgacctgcggctgatctatctggccctggcccacatgatcaagttccggggccacttcctgatcgagggcgacctgaaccccgacaacagcgacgtggacaagctgttcatccagctggtgcagacctacaaccagctgttcgaggaaaaccccatcaacgccagcggcgtggacgccaaggccatcctgtctgccagactgagcaagagcagacggctggaaaatctgatcgcccagctgcccggcgagaagaagaatggcctgttcggaaacctgattgccctgagcctgggcctgacccccaacttcaagagcaacttcgacctggccgaggatgccaaactgcagctgagcaaggacacctacgacgacgacctggacaacctgctggcccagatcggcgaccagtacgccgacctgtttctggccgccaagaacctgtccgacgccatcctgctgagcgacatcctgagagtgaacaccgagatcaccaaggcccccctgagcgcctctatgatcaagagatacgacgagcaccaccaggacctgaccctgctgaaagctctcgtgcggcagcagctgcctgagaagtacaaagagattttcttcgaccagagcaagaacggctacgccggctacattgacggcggagccagccaggaagagttctacaagttcatcaagcccatcctggaaaagatggacggcaccgaggaactgctcgtgaagctgaacagagaggacctgctgcggaagcagcggaccttcgacaacggcagcatcccccaccagatccacctgggagagctgcacgccattctgcggcggcaggaagatttttacccattcctgaaggacaaccgggaaaagatcgagaagatcctgaccttccgcatcccctactacgtgggccctctggccaggggaaacagcagattcgcctggatgaccagaaagagcgaggaaaccatcaccccctggaacttcgaggaagtggtggacaagggcgcttccgcccagagcttcatcgagcggatgaccaacttcgataagaacctgcccaacgagaaggtgctgcccaagcacagcctgctgtacgagtacttcaccgtgtataacgagctgaccaaagtgaaatacgtgaccgagggaatgagaaagcccgccttcctgagcggcgagcagaaaaaggccatcgtggacctgctgttcaagaccaaccggaaagtgaccgtgaagcagctgaaagaggactacttcaagaaaatcgagtgcttcgactccgtggaaatctccggcgtggaagatcggttcaacgcctccctgggcacataccacgatctgctgaaaattatcaaggacaaggacttcctggacaatgaggaaaacgaggacattctggaagatatcgtgctgaccctgacactgtttgaggacagagagatgatcgaggaacggctgaaaacctatgcccacctgttcgacgacaaagtgatgaagcagctgaagcggcggagatacaccggctggggcaggctgagccggaagctgatcaacggcatccgggacaagcagtccggcaagacaatcctggatttcctgaagtccgacggcttcgccaacagaaacttcatgcagctgatccacgacgacagcctgacctttaaagaggacatccagaaagcccaggtgtccggccagggcgatagcctgcacgagcacattgccaatctggccggcagccccgccattaagaagggcatcctgcagacagtgaaggtggtggacgagctcgtgaaagtgatgggccggcacaagcccgagaacatcgtgatcgaaatggccagagagaaccagaccacccagaagggacagaagaacagccgcgagagaatgaagcggatcgaagagggcatcaaagagctgggcagccagatcctgaaagaacaccccgtggaaaacacccagctgcagaacgagaagctgtacctgtactacctgcagaatgggcgggatatgtacgtggaccaggaactggacatcaaccggctgtccgactacgatgtggacgctatcgtgcctcagagctttctgaaggacgactccatcgacaacaaggtgctgaccagaagcgacaagaaccggggcaagagcgacaacgtgccctccgaagaggtcgtgaagaagatgaagaactactggcggcagctgctgaacgccaagctgattacccagagaaagttcgacaatctgaccaaggccgagagaggcggcctgagcgaactggataaggccggcttcatcaagagacagctggtggaaacccggcagatcacaaagcacgtggcacagatcctggactcccggatgaacactaagtacgacgagaatgacaagctgatccgggaagtgaaagtgatcaccctgaagtccaagctggtgtccgatttccggaaggatttccagttttacaaagtgcgcgagatcaacaactaccaccacgcccacgacgcctacctgaacgccgtcgtgggaaccgccctgatcaaaaagtaccctaagctggaaagcgagttcgtgtacggcgactacaaggtgtacgacgtgcggaagatgatcgccaagagcgagcaggaaatcggcaaggctaccgccaagtacttcttctacagcaacatcatgaactttttcaagaccgagattaccctggccaacggcgagatccggaagcggcctctgatcgagacaaacggcgaaaccggggagatcgtgtgggataagggccgggattttgccaccgtgcggaaagtgctgagcatgccccaagtgaatatcgtgaaaaagaccgaggtgcagacaggcggcttcagcaaagagtctatcctgcccaagaggaacagcgataagctgatcgccagaaagaaggactgggaccctaagaagtacggcggcttcgacagccccaccgtggcctattctgtgctggtggtggccaaagtggaaaagggcaagtccaagaaactgaagagtgtgaaagagctgctggggatcaccatcatggaaagaagcagcttcgagaagaatcccatcgactttctggaagccaagggctacaaagaagtgaaaaaggacctgatcatcaagctgcctaagtactccctgttcgagctggaaaacggccggaagagaatgctggcctctgccggcgaactgcagaagggaaacgaactggccctgccctccaaatatgtgaacttcctgtacctggccagccactatgagaagctgaagggctcccccgaggataatgagcagaaacagctgtttgtggaacagcacaagcactacctggacgagatcatcgagcagatcagcgagttctccaagagagtgatcctggccgacgctaatctggacaaagtgctgtccgcctacaacaagcaccgggataagcccatcagagagcaggccgagaatatcatccacctgtttaccctgaccaatctgggagcccctgccgccttcaagtactttgacaccaccatcgaccggaagaggtacaccagcaccaaagaggtgctggacgccaccctgatccaccagagcatcaccggcctgtacgagacacggatcgacctgtctcagctgggaggtgactctggaggatctagcggaggatcctctggcagcgagacaccaggaacaagcgagtcagcaacaccagagagcagtggcggcagcagcggcggcagcagcaccctaaatatagaagatgagtatcggctacatgagacctcaaaagagccagatgtttctctagggtccacatggctgtctgattttcctcaggcctgggcggaaaccgggggcatgggactggcagttcgccaagctcctctgatcatacctctgaaagcaacctctacccccgtgtccataaaacaataccccatgtcacaagaagccagactggggatcaagccccacatacagagactgttggaccagggaatactggtaccctgccagtccccctggaacacgcccctgctacccgttaagaaaccagggactaatgattataggcctgtccaggatctgagagaagtcaacaagcgggtggaagatatccaccccaccgtgcccaacccttacaacctcttgagcgggctcccaccgtcccaccagtggtacactgtgcttgatttaaaggatgcctttttctgcctgagactccaccccaccagtcagcctctcttcgcctttgagtggagagatccagagatgggaatctcaggacaattgacctggaccagactcccacagggtttcaaaaacagtcccaccctgtttaatgaggcactgcacagagacctagcagacttccggatccagcacccagacttgatcctgctacagtacgtggatgacttactgctggccgccacttctgagctagactgccaacaaggtactcgggccctgttacaaaccctagggaacctcgggtatcgggcctcggccaagaaagcccaaatttgccagaaacaggtcaagtatctggggtatcttctaaaagagggtcagagatggctgactgaggccagaaaagagactgtgatggggcagcctactcctaagacccctcgacaactaagggagttcctagggaaggcaggcttctgtcgcctcttcatccctgggtttgcagaaatggcagcccccctgtaccctctcaccaaaccggggactctgtttaattggggcccagaccaacaaaaggcctatcaagaaatcaagcaagctcttctaactgccccagccctggggttgccagatttgactaagccctttgaactctttgtcgacgagaagcagggctacgccaaaggtgtcctaacgcaaaaactgggaccttggcgtcggccggtggcctacctgtccaaaaagctagacccagtagcagctgggtggcccccttgcctacggatggtagcagccattgccgtactgacaaaggatgcaggcaagctaaccatgggacagccactagtcattaaggccccccatgcagtagaggcactagtcaaacaaccccccgaccgctggctttccaacgcccggatgactcactatcaggccttgcttttggacacggaccgggtccagttcggaccggtggtagccctgaacccggctacgctgctcccactgcctgaggaagggctgcaacacaactgccttgatatcctggccgaagcccacggaggctcaaaaagaaccgccgacggcagcgaattcgagcccaagaagaagaggaaagtc

SEQ ID NO: 66 - DNA, 5712 bp, synthetic construct
  misc_feature 1..5712: note = Description of Artificial Sequence: Synthetic polynucleotide
  source 1..5712: mol_type = other DNA
gacaagaagtacagcatcggcctggacatcggcaccaactctgtgggctgggccgtgatcaccgacgagtacaaggtgcccagcaagaaattcaaggtgctgggcaacaccgaccggcacagcatcaagaagaacctgatcggagccctgctgttcgacagcggcgaaacagccgaggccacccggctgaagagaaccgccagaagaagatacaccagacggaagaaccggatctgctatctgcaagagatcttcagcaacgagatggccaaggtggacgacagcttcttccacagactggaagagtccttcctggtggaagaggataagaagcacgagcggcaccccatcttcggcaacatcgtggacgaggtggcctaccacgagaagtaccccaccatctaccacctgagaaagaaactggtggacagcaccgacaaggccgacctgcggctgatctatctggccctggcccacatgatcaagttccggggccacttcctgatcgagggcgacctgaaccccgacaacagcgacgtggacaagctgttcatccagctggtgcagacctacaaccagctgttcgaggaaaaccccatcaacgccagcggcgtggacgccaaggccatcctgtctgccagactgagcaagagcagacggctggaaaatctgatcgcccagctgcccggcgagaagaagaatggcctgttcggaaacctgattgccctgagcctgggcctgacccccaacttcaagagcaacttcgacctggccgaggatgccaaactgcagctgagcaaggacacctacgacgacgacctggacaacctgctggcccagatcggcgaccagtacgccgacctgtttctggccgccaagaacctgtccgacgccatcctgctgagcgacatcctgagagtgaacaccgagatcaccaaggcccccctgagcgcctctatgatcaagagatacgacgagcaccaccaggacctgaccctgctgaaagctctcgtgcggcagcagctgcctgagaagtacaaagagattttcttcgaccagagcaagaacggctacgccggctacattgacggcggagccagccaggaagagttctacaagttcatcaagcccatcctggaaaagatggacggcaccgaggaactgctcgtgaagctgaacagagaggacctgctgcggaagcagcggaccttcgacaacggcagcatcccccaccagatccacctgggagagctgcacgccattctgcggcggcaggaagatttttacccattcctgaaggacaaccgggaaaagatcgagaagatcctgaccttccgcatcccctactacgtgggccctctggccaggggaaacagcagattcgcctggatgaccagaaagagcgaggaaaccatcaccccctggaacttcgaggaagtggtggacaagggcgcttccgcccagagcttcatcgagcggatgaccaacttcgataagaacctgcccaacgagaaggtgctgcccaagcacagcctgctgtacgagtacttcaccgtgtataacgagctgaccaaagtgaaatacgtgaccgagggaatgagaaagcccgccttcctgagcggcgagcagaaaaaggccatcgtggacctgctgttcaagaccaaccggaaagtgaccgtgaagcagctgaaagaggactacttcaagaaaatcgagtgcttcgactccgtggaaatctccggcgtggaagatcggttcaacgcctccctgggcacataccacgatctgctgaaaattatcaaggacaaggacttcctggacaatgaggaaaacgaggacattctggaagatatcgtgctgaccctgacactgtttgaggacagagagatgatcgaggaacggctgaaaacctatgcccacctgttcgacgacaaagtgatgaagcagctgaagcggcggagatacaccggctggggcaggctgagccggaagctgatcaacggcatccgggacaagcagtccggcaagacaatcctggatttcctgaagtccgacggcttcgccaacagaaacttcatgcagctgatccacgacgacagcctgacctttaaagaggacatccagaaagcccaggtgtccggccagggcgatagcctgcacgagcacattgccaatctggccggcagccccgccattaagaagggcatcctgcagacagtgaaggtggtggacgagctcgtgaaagtgatgggccggcacaagcccgagaacatcgtgatcgaaatggccagagagaaccagaccacccagaagggacagaagaacagccgcgagagaatgaagcggatcgaagagggcatcaaagagctgggcagccagatcctgaaagaacaccccgtggaaaacacccagctgcagaacgagaagctgtacctgtactacctgcagaatgggcgggatatgtacgtggaccaggaactggacatcaaccggctgtccgactacgatgtggacgctatcgtgcctcagagctttctgaaggacgactccatcgacaacaaggtgctgaccagaagcgacaagaaccggggcaagagcgacaacgtgccctccgaagaggtcgtgaagaagatgaagaactactggcggcagctgctgaacgccaagctgattacccagagaaagttcgacaatctgaccaaggccgagagaggcggcctgagcgaactggataaggccggcttcatcaagagacagctggtggaaacccggcagatcacaaagcacgtggcacagatcctggactcccggatgaacactaagtacgacgagaatgacaagctgatccgggaagtgaaagtgatcaccctgaagtccaagctggtgtccgatttccggaaggatttccagttttacaaagtgcgcgagatcaacaactaccaccacgcccacgacgcctacctgaacgccgtcgtgggaaccgccctgatcaaaaagtaccctaagctggaaagcgagttcgtgtacggcgactacaaggtgtacgacgtgcggaagatgatcgccaagagcgagcaggaaatcggcaaggctaccgccaagtacttcttctacagcaacatcatgaactttttcaagaccgagattaccctggccaacggcgagatccggaagcggcctctgatcgagacaaacggcgaaaccggggagatcgtgtgggataagggccgggattttgccaccgtgcggaaagtgctgagcatgccccaagtgaatatcgtgaaaaagaccgaggtgcagacaggcggcttcagcaaagagtctatcctgcccaagaggaacagcgataagctgatcgccagaaagaaggactgggaccctaagaagtacggcggcttcgacagccccaccgtggcctattctgtgctggtggtggccaaagtggaaaagggcaagtccaagaaactgaagagtgtgaaagagctgctggggatcaccatcatggaaagaagcagcttcgagaagaatcccatcgactttctggaagccaagggctacaaagaagtgaaaaaggacctgatcatcaagctgcctaagtactccctgttcgagctggaaaacggccggaagagaatgctggcctctgccggcgaactgcagaagggaaacgaactggccctgccctccaaatatgtgaacttcctgtacctggccagccactatgagaagctgaagggctcccccgaggataatgagcagaaacagctgtttgtggaacagcacaagcactacctggacgagatcatcgagcagatcagcgagttctccaagagagtgatcctggccgacgctaatctggacaaagtgctgtccgcctacaacaagcaccgggataagcccatcagagagcaggccgagaatatcatccacctgtttaccctgaccaatctgggagcccctgccgccttcaagtactttgacaccaccatcgaccggaagaggtacaccagcaccaaagaggtgctggacgccaccctgatccaccagagcatcaccggcctgtacgagacacggatcgacctgtctcagctgggaggtgactctggaggatctagcggaggatcctctggcagcgagacaccaggaacaagcgagtcagcaacaccagagagcagtggcggcagcagcggcggcagcagcaccctaaatatagaagatgagtatcggctacatgagacctcaaaagagccagatgtttctctagggtccacatggctgtctgattttcctcaggcctgggcggaaaccgggggcatgggactggcagttcgccaagctcctctgatcatacctctgaaagcaacctctacccccgtgtccataaaacaataccccatgtcacaagaagccagactggggatcaagccccacatacagagactgttggaccagggaatactggtaccctgccagtccccctggaacacgcccctgctacccgttaagaaaccagggactaatgattataggcctgtccaggatctgagagaagtcaacaagcgggtggaagatatccaccccaccgtgcccaacccttacaacctcttgagcgggctcccaccgtcccaccagtggtacactgtgcttgatttaaaggatgcctttttctgcctgagactccaccccaccagtcagcctctcttcgcctttgagtggagagatccagagatgggaatctcaggacaattgacctggaccagactcccacagggtttcaaaaacagtcccaccctgtttaatgaggcactgcacagagacctagcagacttccggatccagcacccagacttgatcctgctacagtacgtggatgacttactgctggccgccacttctgagctagactgccaacaaggtactcgggccctgttacaaaccctagggaacctcgggtatcgggcctcggccaagaaagcccaaatttgccagaaacaggtcaagtatctggggtatcttctaaaagagggtcagagatggctgactgaggccagaaaagagactgtgatggggcagcctactcctaagacccctcgacaactaagggagttcctagggaaggcaggcttctgtcgcctcttcatccctgggtttgcagaaatggcagcccccctgtaccctctcaccaaaccggggactctgtttaattggggcccagaccaacaaaaggcctatcaagaaatcaagcaagctcttctaactgccccagccctggggttgccagatttgactaagccctttgaactctttgtcgacgagaagcagggctacgccaaaggtgtcctaacgcaaaaactgggaccttggcgtcggccggtggcctacctgtccaaaaagctagacccagtagcagctgggtggcccccttgcctacggatggtagcagccattgccgtactgacaaaggatgcaggcaagctaaccatgggacagccactagtcattaaggccccccatgcagtagaggcactagtcaaacaaccccccgaccgctggctttccaacgcccggatgactcactatcaggccttgcttttggacacggaccgggtccagttcggaccggtggtagccctgaacccggctacgctgctcccactgcctgaggaagggctgcaacacaactgccttgatatcctggccgaagcccacgga

SEQ ID NO: 67 - RNA, 5712 nt, synthetic construct
  misc_feature 1..5712: note = Description of Artificial Sequence: Synthetic polynucleotide
  source 1..5712: mol_type = other RNA
gacaagaagtacagcatcggcctggacatcggcaccaactctgtgggctgggccgtgatcaccgacgagtacaaggtgcccagcaagaaattcaaggtgctgggcaacaccgaccggcacagcatcaagaagaacctgatcggagccctgctgttcgacagcggcgaaacagccgaggccacccggctgaagagaaccgccagaagaagatacaccagacggaagaaccggatctgctatctgcaagagatcttcagcaacgagatggccaaggtggacgacagcttcttccacagactggaagagtccttcctggtggaagaggataagaagcacgagcggcaccccatcttcggcaacatcgtggacgaggtggcctaccacgagaagtaccccaccatctaccacctgagaaagaaactggtggacagcaccgacaaggccgacctgcggctgatctatctggccctggcccacatgatcaagttccggggccacttcctgatcgagggcgacctgaaccccgacaacagcgacgtggacaagctgttcatccagctggtgcagacctacaaccagctgttcgaggaaaaccccatcaacgccagcggcgtggacgccaaggccatcctgtctgccagactgagcaagagcagacggctggaaaatctgatcgcccagctgcccggcgagaagaagaatggcctgttcggaaacctgattgccctgagcctgggcctgacccccaacttcaagagcaacttcgacctggccgaggatgccaaactgcagctgagcaaggacacctacgacgacgacctggacaacctgctggcccagatcggcgaccagtacgccgacctgtttctggccgccaagaacctgtccgacgccatcctgctgagcgacatcctgagagtgaacaccgagatcaccaaggcccccctgagcgcctctatgatcaagagatacgacgagcaccaccaggacctgaccctgctgaaagctctcgtgcggcagcagctgcctgagaagtacaaagagattttcttcgaccagagcaagaacggctacgccggctacattgacggcggagccagccaggaagagttctacaagttcatcaagcccatcctggaaaagatggacggcaccgaggaactgctcgtgaagctgaacagagaggacctgctgcggaagcagcggaccttcgacaacggcagcatcccccaccagatccacctgggagagctgcacgccattctgcggcggcaggaagatttttacccattcctgaaggacaaccgggaaaagatcgagaagatcctgaccttccgcatcccctactacgtgggccctctggccaggggaaacagcagattcgcctggatgaccagaaagagcgaggaaaccatcaccccctggaacttcgaggaagtggtggacaagggcgcttccgcccagagcttcatcgagcggatgaccaacttcgataagaacctgcccaacgagaaggtgctgcccaagcacagcctgctgtacgagtacttcaccgtgtataacgagctgaccaaagtgaaatacgtgaccgagggaatgagaaagcccgccttcctgagcggcgagcagaaaaaggccatcgtggacctgctgttcaagaccaaccggaaagtgaccgtgaagcagctgaaagaggactacttcaagaaaatcgagtgcttcgactccgtggaaatctccggcgtggaagatcggttcaacgcctccctgggcacataccacgatctgctgaaaattatcaaggacaaggacttcctggacaatgaggaaaacgaggacattctggaagatatcgtgctgaccctgacactgtttgaggacagagagatgatcgaggaacggctgaaaacctatgcccacctgttcgacgacaaagtgatgaagcagctgaagcggcggagatacaccggctggggcaggctgagccggaagctgatcaacggcatccgggacaagcagtccggcaagacaatcctggatttcctgaagtccgacggcttcgccaacagaaacttcatgcagctgatccacgacgacagcctgacctttaaagaggacatccagaaagcccaggtgtccggccagggcgatagcctgcacgagcacattgccaatctggccggcagccccgccattaagaagggcatcctgcagacagtgaaggtggtggacgagctcgtgaaagtgatgggccggcacaagcccgagaacatcgtgatcgaaatggccagagagaaccagaccacccagaagggacagaagaacagccgcgagagaatgaagcggatcgaagagggcatcaaagagctgggcagccagatcctgaaagaacaccccgtggaaaacacccagctgcagaacgagaagctgtacctgtactacctgcagaatgggcgggatatgtacgtggaccaggaactggacatcaaccggctgtccgactacgatgtggacgctatcgtgcctcagagctttctgaaggacgactccatcgacaacaaggtgctgaccagaagcgacaagaaccggggcaagagcgacaacgtgccctccgaagaggtcgtgaagaagatgaagaactactggcggcagctgctgaacgccaagctgattacccagagaaagttcgacaatctgaccaaggccgagagaggcggcctgagcgaactggataaggccggcttcatcaagagacagctggtggaaacccggcagatcacaaagcacgtggcacagatcctggactcccggatgaacactaagtacgacgagaatgacaagctgatccgggaagtgaaagtgatcaccctgaagtccaagctggtgtccgatttccggaaggatttccagttttacaaagtgcgcgagatcaacaactaccaccacgcccacgacgcctacctgaacgccgtcgtgggaaccgccctgatcaaaaagtaccctaagctggaaagcgagttcgtgtacggcgactacaaggtgtacgacgtgcggaagatgatcgccaagagcgagcaggaaatcggcaaggctaccgccaagtacttcttctacagcaacatcatgaactttttcaagaccgagattaccctggccaacggcgagatccggaagcggcctctgatcgagacaaacggcgaaaccggggagatcgtgtgggataagggccgggattttgccaccgtgcggaaagtgctgagcatgccccaagtgaatatcgtgaaaaagaccgaggtgcagacaggcggcttcagcaaagagtctatcctgcccaagaggaacagcgataagctgatcgccagaaagaaggactgggaccctaagaagtacggcggcttcgacagccccaccgtggcctattctgtgctggtggtggccaaagtggaaaagggcaagtccaagaaactgaagagtgtgaaagagctgctggggatcaccatcatggaaagaagcagcttcgagaagaatcccatcgactttctggaagccaagggctacaaagaagtgaaaaaggacctgatcatcaagctgcctaagtactccctgttcgagctggaaaacggccggaagagaatgctggcctctgccggcgaactgcagaagggaaacgaactggccctgccctccaaatatgtgaacttcctgtacctggccagccactatgagaagctgaagggctcccccgaggataatgagcagaaacagctgtttgtggaacagcacaagcactacctggacgagatcatcgagcagatcagcgagttctccaagagagtgatcctggccgacgctaatctggacaaagtgctgtccgcctacaacaagcaccgggataagcccatcagagagcaggccgagaatatcatccacctgtttaccctgaccaatctgggagcccctgccgccttcaagtactttgacaccaccatcgaccggaagaggtacaccagcaccaaagaggtgctggacgccaccctgatccaccagagcatcaccggcctgtacgagacacggatcgacctgtctcagctgggaggtgactctggaggatctagcggaggatcctctggcagcgagacaccaggaacaagcgagtcagcaacaccagagagcagtggcggcagcagcggcggcagcagcaccctaaatatagaagatgagtatcggctacatgagacctcaaaagagccagatgtttctctagggtccacatggctgtctgattttcctcaggcctgggcggaaaccgggggcatgggactggcagttcgccaagctcctctgatcatacctctgaaagcaacctctacccccgtgtccataaaacaataccccatgtcacaagaagccagactggggatcaagccccacatacagagactgttggaccagggaatactggtaccctgccagtccccctggaacacgcccctgctacccgttaagaaaccagggactaatgattataggcctgtccaggatctgagagaagtcaacaagcgggtggaagatatccaccccaccgtgcccaacccttacaacctcttgagcgggctcccaccgtcccaccagtggtacactgtgcttgatttaaaggatgcctttttctgcctgagactccaccccaccagtcagcctctcttcgcctttgagtggagagatccagagatgggaatctcaggacaattgacctggaccagactcccacagggtttcaaaaacagtcccaccctgtttaatgaggcactgcacagagacctagcagacttccggatccagcacccagacttgatcctgctacagtacgtggatgacttactgctggccgccacttctgagctagactgccaacaaggtactcgggccctgttacaaaccctagggaacctcgggtatcgggcctcggccaagaaagcccaaatttgccagaaacaggtcaagtatctggggtatcttctaaaagagggtcagagatggctgactgaggccagaaaagagactgtgatggggcagcctactcctaagacccctcgacaactaagggagttcctagggaaggcaggcttctgtcgcctcttcatccctgggtttgcagaaatggcagcccccctgtaccctctcaccaaaccggggactctgtttaattggggcccagaccaacaaaaggcctatcaagaaatcaagcaagctcttctaactgccccagccctggggttgccagatttgactaagccctttgaactctttgtcgacgagaagcagggctacgccaaaggtgtcctaacgcaaaaactgggaccttggcgtcggccggtggcctacctgtccaaaaagctagacccagtagcagctgggtggcccccttgcctacggatggtagcagccattgccgtactgacaaaggatgcaggcaagctaaccatgggacagccactagtcattaaggccccccatgcagtagaggcactagtcaaacaaccccccgaccgctggctttccaacgcccggatgactcactatcaggccttgcttttggacacggaccgggtccagttcggaccggtggtagccctgaacccggctacgctgctcccactgcctgaggaagggctgcaacacaactgccttgatatcctggccgaagcccacgga

SEQ ID NO: 68 - DNA, 1512 bp, synthetic construct
  misc_feature 1..1512: note = Description of Artificial Sequence: Synthetic polynucleotide
  source 1..1512: mol_type = other DNA
accctaaatatagaagatgagtatcggctacatgagacctcaaaagagccagatgtttctctagggtccacatggctgtctgattttcctcaggcctgggcggaaaccgggggcatgggactggcagttcgccaagctcctctgatcatacctctgaaagcaacctctacccccgtgtccataaaacaataccccatgtcacaagaagccagactggggatcaagccccacatacagagactgttggaccagggaatactggtaccctgccagtccccctggaacacgcccctgctacccgttaagaaaccagggactaatgattataggcctgtccaggatctgagagaagtcaacaagcgggtggaagatatccaccccaccgtgcccaacccttacaacctcttgagcgggctcccaccgtcccaccagtggtacactgtgcttgatttaaaggatgcctttttctgcctgagactccaccccaccagtcagcctctcttcgcctttgagtggagagatccagagatgggaatctcaggacaattgacctggaccagactcccacagggtttcaaaaacagtcccaccctgtttaatgaggcactgcacagagacctagcagacttccggatccagcacccagacttgatcctgctacagtacgtggatgacttactgctggccgccacttctgagctagactgccaacaaggtactcgggccctgttacaaaccctagggaacctcgggtatcgggcctcggccaagaaagcccaaatttgccagaaacaggtcaagtatctggggtatcttctaaaagagggtcagagatggctgactgaggccagaaaagagactgtgatggggcagcctactcctaagacccctcgacaactaagggagttcctagggaaggcaggcttctgtcgcctcttcatccctgggtttgcagaaatggcagcccccctgtaccctctcaccaaaccggggactctgtttaattggggcccagaccaacaaaaggcctatcaagaaatcaagcaagctcttctaactgccccagccctggggttgccagatttgactaagccctttgaactctttgtcgacgagaagcagggctacgccaaaggtgtcctaacgcaaaaactgggaccttggcgtcggccggtggcctacctgtccaaaaagctagacccagtagcagctgggtggcccccttgcctacggatggtagcagccattgccgtactgacaaaggatgcaggcaagctaaccatgggacagccactagtcattaaggccccccatgcagtagaggcactagtcaaacaaccccccgaccgctggctttccaacgcccggatgactcactatcaggccttgcttttggacacggaccgggtccagttcggaccggtggtagccctgaacccggctacgctgctcccactgcctgaggaagggctgcaacacaactgccttgatatcctggccgaagcccacgga

SEQ ID NO: 69 - RNA, 1512 nt, synthetic construct
  misc_feature 1..1512: note = Description of Artificial Sequence: Synthetic polynucleotide
  source 1..1512: mol_type = other RNA
accctaaatatagaagatgagtatcggctacatgagacctcaaaagagccagatgtttctctagggtccacatggctgtctgattttcctcaggcctgggcggaaaccgggggcatgggactggcagttcgccaagctcctctgatcatacctctgaaagcaacctctacccccgtgtccataaaacaataccccatgtcacaagaagccagactggggatcaagccccacatacagagactgttggaccagggaatactggtaccctgccagtccccctggaacacgcccctgctacccgttaagaaaccagggactaatgattataggcctgtccaggatctgagagaagtcaacaagcgggtggaagatatccaccccaccgtgcccaacccttacaacctcttgagcgggctcccaccgtcccaccagtggtacactgtgcttgatttaaaggatgcctttttctgcctgagactccaccccaccagtcagcctctcttcgcctttgagtggagagatccagagatgggaatctcaggacaattgacctggaccagactcccacagggtttcaaaaacagtcccaccctgtttaatgaggcactgcacagagacctagcagacttccggatccagcacccagacttgatcctgctacagtacgtggatgacttactgctggccgccacttctgagctagactgccaacaaggtactcgggccctgttacaaaccctagggaacctcgggtatcgggcctcggccaagaaagcccaaatttgccagaaacaggtcaagtatctggggtatcttctaaaagagggtcagagatggctgactgaggccagaaaagagactgtgatggggcagcctactcctaagacccctcgacaactaagggagttcctagggaaggcaggcttctgtcgcctcttcatccctgggtttgcagaaatggcagcccccctgtaccctctcaccaaaccggggactctgtttaattggggcccagaccaacaaaaggcctatcaagaaatcaagcaagctcttctaactgccccagccctggggttgccagatttgactaagccctttgaactctttgtcgacgagaagcagggctacgccaaaggtgtcctaacgcaaaaactgggaccttggcgtcggccggtggcctacctgtccaaaaagctagacccagtagcagctgggtggcccccttgcctacggatggtagcagccattgccgtactgacaaaggatgcaggcaagctaaccatgggacagccactagtcattaaggccccccatgcagtagaggcactagtcaaacaaccccccgaccgctggctttccaacgcccggatgactcactatcaggccttgcttttggacacggaccgggtccagttcggaccggtggtagccctgaacccggctacgctgctcccactgcctgaggaagggctgcaacacaactgccttgatatcctggccgaagcccacgga

SEQ ID NO: 70 - protein, 1866 aa, synthetic construct
  REGION 1..1866: note = Description of Artificial Sequence: Synthetic polypeptide
MKRTADGSEFESPKKKRKVDKKYSIGLDIGTNSVGWAVITDEYKVPSKKFKVLGNTDRHSIKKNLIGALLFDSGETAEATRLKRTARRRYTRRKNRICYLQEIFSNEMAKVDDSFFHRLEESFLVEEDKKHERHPIFGNIVDEVAYHEKYPTIYHLRKKLVDSTDKADLRLIYLALAHMIKFRGHFLIEGDLNPDNSDVDKLFIQLVQTYNQLFEENPINASGVDAKAILSARLSKSRRLENLIAQLPGEKKNGLFGNLIALSLGLTPNFKSNFDLAEDAKLQLSKDTYDDDLDNLLAQIGDQYADLFLAAKNLSDAILLSDILRVNTEITKAPLSASMIKRYDEHHQDLTLLKALVRQQLPEKYKEIFFDQSKNGYAGYIDGGASQEEFYKFIKPILEKMDGTEELLVKLNREDLLRKQRTFDNGSIPHQIHLGELHAILRRQEDFYPFLKDNREKIEKILTFRIPYYVGPLARGNSRFAWMTRKSEETITPWNFEEVVDKGASAQSFIERMTNFDKNLPNEKVLPKHSLLYEYFTVYNELTKVKYVTEGMRKPAFLSGEQKKAIVDLLFKTNRKVTVKQLKEDYFKKIECFDSVEISGVEDRFNASLGTYHDLLKIIKDKDFLDNEENEDILEDIVLTLTLFEDREMIEERLKTYAHLFDDKVMKQLKRRRYTGWGRLSRKLINGIRDKQSGKTILDFLKSDGFANRNFMQLIHDDSLTFKEDIQKAQVSGQGDSLHEHIANLAGSPAIKKGILQTVKVVDELVKVMGRHKPENIVIEMARENQTTQKGQKNSRERMKRIEEGIKELGSQILKEHPVENTQLQNEKLYLYYLQNGRDMYVDQELDINRLSDYDVDAIVPQSFLKDDSIDNKVLTRSDKNRGKSDNVPSEEVVKKMKNYWRQLLNAKLITQRKFDNLTKAERGGLSELDKAGFIKRQLVETRQITKHVAQILDSRMNTKYDENDKLIREVKVITLKSKLVSDFRKDFQFYKVREINNYHHAHDAYLNAVVGTALIKKYPKLESEFVYGDYKVYDVRKMIAKSEQEIGKATAKYFFYSNIMNFFKTEITLANGEIRKRPLIETNGETGEIVWDKGRDFATVRKVLSMPQVNIVKKTEVQTGGFSKESILPKRNSDKLIARKKDWDPKKYGGFDSPTVAYSVLVVAKVEKGKSKKLKSVKELLGITIMERSSFEKNPIDFLEAKGYKEVKKDLIIKLPKYSLFELENGRKRMLASAGELQKGNELALPSKYVNFLYLASHYEKLKGSPEDNEQKQLFVEQHKHYLDEIIEQISEFSKRVILADANLDKVLSAYNKHRDKPIREQAENIIHLFTLTNLGAPAAFKYFDTTIDRKRYTSTKEVLDATLIHQSITGLYETRIDLSQLGGDSGGSSGGSSGSETPGTSESATPESSGGSSGGSSTLNIEDEYRLHETSKEPDVSLGSTWLSDFPQAWAETGGMGLAVRQAPLIIPLKATSTPVSIKQYPMSQEARLGIKPHIQRLLDQGILVPCQSPWNTPLLPVKKPGTNDYRPVQDLREVNKRVEDIHPTVPNPYNLLSGLPPSHQWYTVLDLKDAFFCLRLHPTSQPLFAFEWRDPEMGISGQLTWTRLPQGFKNSPTLFNEALHRDLADFRIQHPDLILLQYVDDLLLAATSELDCQQGTRALLQTLGNLGYRASAKKAQICQKQVKYLGYLLKEGQRWLTEARKETVMGQPTPKTPRQLREFLGKAGFCRLFIPGFAEMAAPLYPLTKPGTLFNWGPDQQKAYQEIKQALLTAPALGLPDLTKPFELFVDEKQGYAKGVLTQKLGPWRRPVAYLSKKLDPVAAGWPPCLRMVAAIAVLTKDAGKLTMGSKRTADGSEFEPKKKRKV

SEQ ID NO: 71 - protein, 1803 aa, synthetic construct
  REGION 1..1803: note = Description of Artificial Sequence: Synthetic polypeptide
MKRTADGSEFESPKKKRKVDKKYSIGLDIGTNSVGWAVITDEYKVPSKKFKVLGNTDRHSIKKNLIGALLFDSGETAEATRLKRTARRRYTRRKNRICYLQEIFSNEMAKVDDSFFHRLEESFLVEEDKKHERHPIFGNIVDEVAYHEKYPTIYHLRKKLVDSTDKADLRLIYLALAHMIKFRGHFLIEGDLNPDNSDVDKLFIQLVQTYNQLFEENPINASGVDAKAILSARLSKSRRLENLIAQLPGEKKNGLFGNLIALSLGLTPNFKSNFDLAEDAKLQLSKDTYDDDLDNLLAQIGDQYADLFLAAKNLSDAILLSDILRVNTEITKAPLSASMIKRYDEHHQDLTLLKALVRQQLPEKYKEIFFDQSKNGYAGYIDGGASQEEFYKFIKPILEKMDGTEELLVKLNREDLLRKQRTFDNGSIPHQIHLGELHAILRRQEDFYPFLKDNREKIEKILTFRIPYYVGPLARGNSRFAWMTRKSEETITPWNFEEVVDKGASAQSFIERMTNFDKNLPNEKVLPKHSLLYEYFTVYNELTKVKYVTEGMRKPAFLSGEQKKAIVDLLFKTNRKVTVKQLKEDYFKKIECFDSVEISGVEDRFNASLGTYHDLLKIIKDKDFLDNEENEDILEDIVLTLTLFEDREMIEERLKTYAHLFDDKVMKQLKRRRYTGWGRLSRKLINGIRDKQSGKTILDFLKSDGFANRNFMQLIHDDSLTFKEDIQKAQVSGQGDSLHEHIANLAGSPAIKKGILQTVKVVDELVKVMGRHKPENIVIEMARENQTTQKGQKNSRERMKRIEEGIKELGSQILKEHPVENTQLQNEKLYLYYLQNGRDMYVDQELDINRLSDYDVDAIVPQSFLKDDSIDNKVLTRSDKNRGKSDNVPSEEVVKKMKNYWRQLLNAKLITQRKFDNLTKAERGGLSELDKAGFIKRQLVETRQITKHVAQILDSRMNTKYDENDKLIREVKVITLKSKLVSDFRKDFQFYKVREINNYHHAHDAYLNAVVGTALIKKYPKLESEFVYGDYKVYDVRKMIAKSEQEIGKATAKYFFYSNIMNFFKTEITLANGEIRKRPLIETNGETGEIVWDKGRDFATVRKVLSMPQVNIVKKTEVQTGGFSKESILPKRNSDKLIARKKDWDPKKYGGFDSPTVAYSVLVVAKVEKGKSKKLKSVKELLGITIMERSSFEKNPIDFLEAKGYKEVKKDLIIKLPKYSLFELENGRKRMLASAGELQKGNELALPSKYVNFLYLASHYEKLKGSPEDNEQKQLFVEQHKHYLDEIIEQISEFSKRVILADANLDKVLSAYNKHRDKPIREQAENIIHLFTLTNLGAPAAFKYFDTTIDRKRYTSTKEVLDATLIHQSITGLYETRIDLSQLGGDSGGSSGGSSGSETPGTSESATPESSGGSSGGSSTLNIEDEYRLHETSKEPDVSLGSTWLSDFPQAWAETGGMGLAVRQAPLIIPLKATSTPVSIKQYPMSQEARLGIKPHIQRLLDQGILVPCQSPWNTPLLPVKKPGTNDYRPVQDLREVNKRVEDIHPTVPNPRNLLSGLPPSHQWYTVLDLKDAFFCLRLHPTSQPLFAFEWRDPEMGISGQLTWTRLPQGFKNSPTLFNEALHRDLADFRIQHPDLILLQYVDDLLLAATSELDCQQGTRALLQTLGNLGYRASAKKAQICQKQVKYLGRLLKEGQRWLTEARKETVMGQPTPKTPRQLREFLGKAGFCRLFIPGFAEMAAPLYPLTKPGTLFNWGPDQQKAYQEIKQALLTAPALGLPDLTKPGSKRTADGSEFEPKKKRKV

SEQ ID NO: 72 - protein, 1803 aa, synthetic construct
  REGION 1..1803: note = Description of Artificial Sequence: Synthetic polypeptide
MKRTADGSEFESPKKKRKVDKKYSIGLDIGTNSVGWAVITDEYKVPSKKFKVLGNTDRHSIKKNLIGALLFDSGETAEATRLKRTARRRYTRRKNRICYLQEIFSNEMAKVDDSFFHRLEESFLVEEDKKHERHPIFGNIVDEVAYHEKYPTIYHLRKKLVDSTDKADLRLIYLALAHMIKFRGHFLIEGDLNPDNSDVDKLFIQLVQTYNQLFEENPINASGVDAKAILSARLSKSRRLENLIAQLPGEKKNGLFGNLIALSLGLTPNFKSNFDLAEDAKLQLSKDTYDDDLDNLLAQIGDQYADLFLAAKNLSDAILLSDILRVNTEITKAPLSASMIKRYDEHHQDLTLLKALVRQQLPEKYKEIFFDQSKNGYAGYIDGGASQEEFYKFIKPILEKMDGTEELLVKLNREDLLRKQRTFDNGSIPHQIHLGELHAILRRQEDFYPFLKDNREKIEKILTFRIPYYVGPLARGNSRFAWMTRKSEETITPWNFEEVVDKGASAQSFIERMTNFDKNLPNEKVLPKHSLLYEYFTVYNELTKVKYVTEGMRKPAFLSGEQKKAIVDLLFKTNRKVTVKQLKEDYFKKIECFDSVEISGVEDRFNASLGTYHDLLKIIKDKDFLDNEENEDILEDIVLTLTLFEDREMIEERLKTYAHLFDDKVMKQLKRRRYTGWGRLSRKLINGIRDKQSGKTILDFLKSDGFANRNFMQLIHDDSLTFKEDIQKAQVSGQGDSLHEHIANLAGSPAIKKGILQTVKVVDELVKVMGRHKPENIVIEMARENQTTQKGQKNSRERMKRIEEGIKELGSQILKEHPVENTQLQNEKLYLYYLQNGRDMYVDQELDINRLSDYDVDAIVPQSFLKDDSIDNKVLTRSDKNRGKSDNVPSEEVVKKMKNYWRQLLNAKLITQRKFDNLTKAERGGLSELDKAGFIKRQLVETRQITKHVAQILDSRMNTKYDENDKLIREVKVITLKSKLVSDFRKDFQFYKVREINNYHHAHDAYLNAVVGTALIKKYPKLESEFVYGDYKVYDVRKMIAKSEQEIGKATAKYFFYSNIMNFFKTEITLANGEIRKRPLIETNGETGEIVWDKGRDFATVRKVLSMPQVNIVKKTEVQTGGFSKESILPKRNSDKLIARKKDWDPKKYGGFDSPTVAYSVLVVAKVEKGKSKKLKSVKELLGITIMERSSFEKNPIDFLEAKGYKEVKKDLIIKLPKYSLFELENGRKRMLASAGELQKGNELALPSKYVNFLYLASHYEKLKGSPEDNEQKQLFVEQHKHYLDEIIEQISEFSKRVILADANLDKVLSAYNKHRDKPIREQAENIIHLFTLTNLGAPAAFKYFDTTIDRKRYTSTKEVLDATLIHQSITGLYETRIDLSQLGGDSGGSSGGSSGSETPGTSESATPESSGGSSGGSSTLNIEDEYRLHETSKEPDVSLGSTWLSDFPQAWAETGGMGLAVRQAPLIIPLKATSTPVSIKQYPMSQEARLGIKPHIQRLLDQGILVPCQSPWNTPLLPVKKPGTNDYRPVQDLREVNKRVEDIHPTVPNPYNLLSGLPPSHQWYTVLDLKDAFFCLRLHPTSQPLFAFEWRDPEMGISGQLTWTRLPQGFKNSPTLFNEALHRDLADFRIQHPDLILLQYVDDLLLAATSELDCQQGTRALLQTLGNLGYRASAKKAQICQKQVKYLGYLLKEGQRWLTEARKETVMGQPTPKTPRQLREFLGKAGFCRLFIPGFAEMAAPLYPLTKPGTLFNWGPDQQKAYQEIKQALLTAPALGLPDLTKPGSKRTADGSEFEPKKKRKV

SEQ ID NO: 73 - protein, 1816 aa, synthetic construct
  REGION 1..1816: note = Description of Artificial Sequence: Synthetic polypeptide
MKRTADGSEFESPKKKRKVDKKYSIGLDIGTNSVGWAVITDEYKVPSKKFKVLGNTDRHSIKKNLIGALLFDSGETAEATRLKRTARRRYTRRKNRICYLQEIFSNEMAKVDDSFFHRLEESFLVEEDKKHERHPIFGNIVDEVAYHEKYPTIYHLRKKLVDSTDKADLRLIYLALAHMIKFRGHFLIEGDLNPDNSDVDKLFIQLVQTYNQLFEENPINASGVDAKAILSARLSKSRRLENLIAQLPGEKKNGLFGNLIALSLGLTPNFKSNFDLAEDAKLQLSKDTYDDDLDNLLAQIGDQYADLFLAAKNLSDAILLSDILRVNTEITKAPLSASMIKRYDEHHQDLTLLKALVRQQLPEKYKEIFFDQSKNGYAGYIDGGASQEEFYKFIKPILEKMDGTEELLVKLNREDLLRKQRTFDNGSIPHQIHLGELHAILRRQEDFYPFLKDNREKIEKILTFRIPYYVGPLARGNSRFAWMTRKSEETITPWNFEEVVDKGASAQSFIERMTNFDKNLPNEKVLPKHSLLYEYFTVYNELTKVKYVTEGMRKPAFLSGEQKKAIVDLLFKTNRKVTVKQLKEDYFKKIECFDSVEISGVEDRFNASLGTYHDLLKIIKDKDFLDNEENEDILEDIVLTLTLFEDREMIEERLKTYAHLFDDKVMKQLKRRRYTGWGRLSRKLINGIRDKQSGKTILDFLKSDGFANRNFMQLIHDDSLTFKEDIQKAQVSGQGDSLHEHIANLAGSPAIKKGILQTVKVVDELVKVMGRHKPENIVIEMARENQTTQKGQKNSRERMKRIEEGIKELGSQILKEHPVENTQLQNEKLYLYYLQNGRDMYVDQELDINRLSDYDVDAIVPQSFLKDDSIDNKVLTRSDKNRGKSDNVPSEEVVKKMKNYWRQLLNAKLITQRKFDNLTKAERGGLSELDKAGFIKRQLVETRQITKHVAQILDSRMNTKYDENDKLIREVKVITLKSKLVSDFRKDFQFYKVREINNYHHAHDAYLNAVVGTALIKKYPKLESEFVYGDYKVYDVRKMIAKSEQEIGKATAKYFFYSNIMNFFKTEITLANGEIRKRPLIETNGETGEIVWDKGRDFATVRKVLSMPQVNIVKKTEVQTGGFSKESILPKRNSDKLIARKKDWDPKKYGGFDSPTVAYSVLVVAKVEKGKSKKLKSVKELLGITIMERSSFEKNPIDFLEAKGYKEVKKDLIIKLPKYSLFELENGRKRMLASAGELQKGNELALPSKYVNFLYLASHYEKLKGSPEDNEQKQLFVEQHKHYLDEIIEQISEFSKRVILADANLDKVLSAYNKHRDKPIREQAENIIHLFTLTNLGAPAAFKYFDTTIDRKRYTSTKEVLDATLIHQSITGLYETRIDLSQLGGDSGGSSGGSSGSETPGTSESATPESSGGSSGGSSTLNIEDEYRLHETSKEPDVSLGSTWLSDFPQAWAETGGMGLAVRQAPLIIPLKATSTPVSIKQYPMSQEARLGIKPHIQRLLDQGILVPCQSPWNTPLLPVKKPGTNDYRPVQDLREVNKRVEDIHPTVPNPYNLLSGLPPSHQWYTVLDLKDAFFCLRLHPTSQPLFAFEWRDPEMGISGQLTWTRLPQGFKNSPTLFNEALHRDLADFRIQHPDLILLQYVDDLLLAATSELDCQQGTRALLQTLGNLGYRASAKKAQICQKQVKYLGYLLKEGQRWLTEARKETVMGQPTPKTPRQLREFLGKAGFCRLFIPGFAEMAAPLYPLTKPGTLFNWGPDQQKAYQEIKQALLTAPALGLPDLTKPFELFVDEKQGYAKGSKRTADGSEFEPKKKRKV

SEQ ID NO: 74 - protein, 1766 aa, synthetic construct
  REGION 1..1766: note = Description of Artificial Sequence: Synthetic polypeptide
MKRTADGSEFESPKKKRKVDKKYSIGLDIGTNSVGWAVITDEYKVPSKKFKVLGNTDRHSIKKNLIGALLFDSGETAEATRLKRTARRRYTRRKNRICYLQEIFSNEMAKVDDSFFHRLEESFLVEEDKKHERHPIFGNIVDEVAYHEKYPTIYHLRKKLVDSTDKADLRLIYLALAHMIKFRGHFLIEGDLNPDNSDVDKLFIQLVQTYNQLFEENPINASGVDAKAILSARLSKSRRLENLIAQLPGEKKNGLFGNLIALSLGLTPNFKSNFDLAEDAKLQLSKDTYDDDLDNLLAQIGDQYADLFLAAKNLSDAILLSDILRVNTEITKAPLSASMIKRYDEHHQDLTLLKALVRQQLPEKYKEIFFDQSKNGYAGYIDGGASQEEFYKFIKPILEKMDGTEELLVKLNREDLLRKQRTFDNGSIPHQIHLGELHAILRRQEDFYPFLKDNREKIEKILTFRIPYYVGPLARGNSRFAWMTRKSEETITPWNFEEVVDKGASAQSFIERMTNFDKNLPNEKVLPKHSLLYEYFTVYNELTKVKYVTEGMRKPAFLSGEQKKAIVDLLFKTNRKVTVKQLKEDYFKKIECFDSVEISGVEDRFNASLGTYHDLLKIIKDKDFLDNEENEDILEDIVLTLTLFEDREMIEERLKTYAHLFDDKVMKQLKRRRYTGWGRLSRKLINGIRDKQSGKTILDFLKSDGFANRNFMQLIHDDSLTFKEDIQKAQVSGQGDSLHEHIANLAGSPAIKKGILQTVKVVDELVKVMGRHKPENIVIEMARENQTTQKGQKNSRERMKRIEEGIKELGSQILKEHPVENTQLQNEKLYLYYLQNGRDMYVDQELDINRLSDYDVDAIVPQSFLKDDSIDNKVLTRSDKNRGKSDNVPSEEVVKKMKNYWRQLLNAKLITQRKFDNLTKAERGGLSELDKAGFIKRQLVETRQITKHVAQILDSRMNTKYDENDKLIREVKVITLKSKLVSDFRKDFQFYKVREINNYHHAHDAYLNAVVGTALIKKYPKLESEFVYGDYKVYDVRKMIAKSEQEIGKATAKYFFYSNIMNFFKTEITLANGEIRKRPLIETNGETGEIVWDKGRDFATVRKVLSMPQVNIVKKTEVQTGGFSKESILPKRNSDKLIARKKDWDPKKYGGFDSPTVAYSVLVVAKVEKGKSKKLKSVKELLGITIMERSSFEKNPIDFLEAKGYKEVKKDLIIKLPKYSLFELENGRKRMLASAGELQKGNELALPSKYVNFLYLASHYEKLKGSPEDNEQKQLFVEQHKHYLDEIIEQISEFSKRVILADANLDKVLSAYNKHRDKPIREQAENIIHLFTLTNLGAPAAFKYFDTTIDRKRYTSTKEVLDATLIHQSITGLYETRIDLSQLGGDSGGSSGGSSGSETPGTSESATPESSGGSSGGSSTLNIEDEYRLHETSKEPDVSLGSTWLSDFPQAWAETGGMGLAVRQAPLIIPLKATSTPVSIKQYPMSQEARLGIKPHIQRLLDQGILVPCQSPWNTPLLPVKKPGTNDYRPVQDLREVNKRVEDIHPTVPNPYNLLSGLPPSHQWYTVLDLKDAFFCLRLHPTSQPLFAFEWRDPEMGISGQLTWTRLPQGFKNSPTLFNEALHRDLADFRIQHPDLILLQYVDDLLLAATSELDCQQGTRALLQTLGNLGYRASAKKAQICQKQVKYLGYLLKEGQRWLTEARKETVMGQPTPKTPRQLREFLGKAGFCRLFIPGFAEMAAPLYPLTGSKRTADGSEFEPKKKRKV

SEQ ID NO: 75 - protein, 1716 aa, synthetic construct
  REGION 1..1716: note = Description of Artificial Sequence: Synthetic polypeptide
MKRTADGSEFESPKKKRKVDKKYSIGLDIGTNSVGWAVITDEYKVPSKKFKVLGNTDRHSIKKNLIGALLFDSGETAEATRLKRTARRRYTRRKNRICYLQEIFSNEMAKVDDSFFHRLEESFLVEEDKKHERHPIFGNIVDEVAYHEKYPTIYHLRKKLVDSTDKADLRLIYLALAHMIKFRGHFLIEGDLNPDNSDVDKLFIQLVQTYNQLFEENPINASGVDAKAILSARLSKSRRLENLIAQLPGEKKNGLFGNLIALSLGLTPNFKSNFDLAEDAKLQLSKDTYDDDLDNLLAQIGDQYADLFLAAKNLSDAILLSDILRVNTEITKAPLSASMIKRYDEHHQDLTLLKALVRQQLPEKYKEIFFDQSKNGYAGYIDGGASQEEFYKFIKPILEKMDGTEELLVKLNREDLLRKQRTFDNGSIPHQIHLGELHAILRRQEDFYPFLKDNREKIEKILTFRIPYYVGPLARGNSRFAWMTRKSEETITPWNFEEVVDKGASAQSFIERMTNFDKNLPNEKVLPKHSLLYEYFTVYNELTKVKYVTEGMRKPAFLSGEQKKAIVDLLFKTNRKVTVKQLKEDYFKKIECFDSVEISGVEDRFNASLGTYHDLLKIIKDKDFLDNEENEDILEDIVLTLTLFEDREMIEERLKTYAHLFDDKVMKQLKRRRYTGWGRLSRKLINGIRDKQSGKTILDFLKSDGFANRNFMQLIHDDSLTFKEDIQKAQVSGQGDSLHEHIANLAGSPAIKKGILQTVKVVDELVKVMGRHKPENIVIEMARENQTTQKGQKNSRERMKRIEEGIKELGSQILKEHPVENTQLQNEKLYLYYLQNGRDMYVDQELDINRLSDYDVDAIVPQSFLKDDSIDNKVLTRSDKNRGKSDNVPSEEVVKKMKNYWRQLLNAKLITQRKFDNLTKAERGGLSELDKAGFIKRQLVETRQITKHVAQILDSRMNTKYDENDKLIREVKVITLKSKLVSDFRKDFQFYKVREINNYHHAHDAYLNAVVGTALIKKYPKLESEFVYGDYKVYDVRKMIAKSEQEIGKATAKYFFYSNIMNFFKTEITLANGEIRKRPLIETNGETGEIVWDKGRDFATVRKVLSMPQVNIVKKTEVQTGGFSKESILPKRNSDKLIARKKDWDPKKYGGFDSPTVAYSVLVVAKVEKGKSKKLKSVKELLGITIMERSSFEKNPIDFLEAKGYKEVKKDLIIKLPKYSLFELENGRKRMLASAGELQKGNELALPSKYVNFLYLASHYEKLKGSPEDNEQKQLFVEQHKHYLDEIIEQISEFSKRVILADANLDKVLSAYNKHRDKPIREQAENIIHLFTLTNLGAPAAFKYFDTTIDRKRYTSTKEVLDATLIHQSITGLYETRIDLSQLGGDSGGSSGGSSGSETPGTSESATPESSGGSSGGSSTLNIEDEYRLHETSKEPDVSLGSTWLSDFPQAWAETGGMGLAVRQAPLIIPLKATSTPVSIKQYPMSQEARLGIKPHIQRLLDQGILVPCQSPWNTPLLPVKKPGTNDYRPVQDLREVNKRVEDIHPTVPNPYNLLSGLPPSHQWYTVLDLKDAFFCLRLHPTSQPLFAFEWRDPEMGISGQLTWTRLPQGFKNSPTLFNEALHRDLADFRIQHPDLILLQYVDDLLLAATSELDCQQGTRALLQTLGNLGYRASAKKAQICQKQVKYLGYLLKEGQRGSKRTADGSEFEPKKKRKV

SEQ ID NO: 76 - protein, 1919 aa, synthetic construct
  REGION 1..1919: note = Description of Artificial Sequence: Synthetic polypeptide
MKRTADGSEFESPKKKRKVDKKYSIGLDIGTNSVGWAVITDEYKVPSKKFKVLGNTDRHSIKKNLIGALLFDSGETAEATRLKRTARRRYTRRKNRICYLQEIFSNEMAKVDDSFFHRLEESFLVEEDKKHERHPIFGNIVDEVAYHEKYPTIYHLRKKLVDSTDKADLRLIYLALAHMIKFRGHFLIEGDLNPDNSDVDKLFIQLVQTYNQLFEENPINASGVDAKAILSARLSKSRRLENLIAQLPGEKKNGLFGNLIALSLGLTPNFKSNFDLAEDAKLQLSKDTYDDDLDNLLAQIGDQYADLFLAAKNLSDAILLSDILRVNTEITKAPLSASMIKRYDEHHQDLTLLKALVRQQLPEKYKEIFFDQSKNGYAGYIDGGASQEEFYKFIKPILEKMDGTEELLVKLNREDLLRKQRTFDNGSIPHQIHLGELHAILRRQEDFYPFLKDNREKIEKILTFRIPYYVGPLARGNSRFAWMTRKSEETITPWNFEEVVDKGASAQSFIERMTNFDKNLPNEKVLPKHSLLYEYFTVYNELTKVKYVTEGMRKPAFLSGEQKKAIVDLLFKTNRKVTVKQLKEDYFKKIECFDSVEISGVEDRFNASLGTYHDLLKIIKDKDFLDNEENEDILEDIVLTLTLFEDREMIEERLKTYAHLFDDKVMKQLKRRRYTGWGRLSRKLINGIRDKQSGKTILDFLKSDGFANRNFMQLIHDDSLTFKEDIQKAQVSGQGDSLHEHIANLAGSPAIKKGILQTVKVVDELVKVMGRHKPENIVIEMARENQTTQKGQKNSRERMKRIEEGIKELGSQILKEHPVENTQLQNEKLYLYYLQNGRDMYVDQELDINRLSDYDVDAIVPQSFLKDDSIDNKVLTRSDKNRGKSDNVPSEEVVKKMKNYWRQLLNAKLITQRKFDNLTKAERGGLSELDKAGFIKRQLVETRQITKHVAQILDSRMNTKYDENDKLIREVKVITLKSKLVSDFRKDFQFYKVREINNYHHAHDAYLNAVVGTALIKKYPKLESEFVYGDYKVYDVRKMIAKSEQEIGKATAKYFFYSNIMNFFKTEITLANGEIRKRPLIETNGETGEIVWDKGRDFATVRKVLSMPQVNIVKKTEVQTGGFSKESILPKRNSDKLIARKKDWDPKKYGGFDSPTVAYSVLVVAKVEKGKSKKLKSVKELLGITIMERSSFEKNPIDFLEAKGYKEVKKDLIIKLPKYSLFELENGRKRMLASAGELQKGNELALPSKYVNFLYLASHYEKLKGSPEDNEQKQLFVEQHKHYLDEIIEQISEFSKRVILADANLDKVLSAYNKHRDKPIREQAENIIHLFTLTNLGAPAAFKYFDTTIDRKRYTSTKEVLDATLIHQSITGLYETRIDLSQLGGDSGGSSGGSSGSETPGTSESATPESSGGSSGGSSTWLSDFPQAWAETGGMGLAVRQAPLIIPLKATSTPVSIKQYPMSQEARLGIKPHIQRLLDQGILVPCQSPWNTPLLPVKKPGTNDYRPVQDLREVNKRVEDIHPTVPNPYNLLSGLPPSHQWYTVLDLKDAFFCLRLHPTSQPLFAFEWRDPEMGISGQLTWTRLPQGFKNSPTLFNEALHRDLADFRIQHPDLILLQYVDDLLLAATSELDCQQGTRALLQTLGNLGYRASAKKAQICQKQVKYLGYLLKEGQRWLTEARKETVMGQPTPKTPRQLREFLGKAGFCRLFIPGFAEMAAPLYPLTKPGTLFNWGPDQQKAYQEIKQALLTAPALGLPDLTKPFELFVDEKQGYAKGVLTQKLGPWRRPVAYLSKKLDPVAAGWPPCLRMVAAIAVLTKDAGKLTMGQPLVIKAPHAVEALVKQPPDRWLSNARMTHYQALLLDTDRVQFGPVVALNPATLLPLPEEGLQHNCLDILAEAHGGSKRTADGSEFEPKKKRKV

SEQ ID NO: 77 - protein, 2116 aa, synthetic construct
  REGION 1..2116: note = Description of Artificial Sequence: Synthetic polypeptide
MKRTADGSEFESPKKKRKVDKKYSIGLDIGTNSVGWAVITDEYKVPSKKFKVLGNTDRHSIKKNLIGALLFDSGETAEATRLKRTARRRYTRRKNRICYLQEIFSNEMAKVDDSFFHRLEESFLVEEDKKHERHPIFGNIVDEVAYHEKYPTIYHLRKKLVDSTDKADLRLIYLALAHMIKFRGHFLIEGDLNPDNSDVDKLFIQLVQTYNQLFEENPINASGVDAKAILSARLSKSRRLENLIAQLPGEKKNGLFGNLIALSLGLTPNFKSNFDLAEDAKLQLSKDTYDDDLDNLLAQIGDQYADLFLAAKNLSDAILLSDILRVNTEITKAPLSASMIKRYDEHHQDLTLLKALVRQQLPEKYKEIFFDQSKNGYAGYIDGGASQEEFYKFIKPILEKMDGTEELLVKLNREDLLRKQRTFDNGSIPHQIHLGELHAILRRQEDFYPFLKDNREKIEKILTFRIPYYVGPLARGNSRFAWMTRKSEETITPWNFEEVVDKGASAQSFIERMTNFDKNLPNEKVLPKHSLLYEYFTVYNELTKVKYVTEGMRKPAFLSGEQKKAIVDLLFKTNRKVTVKQLKEDYFKKIECFDSVEISGVEDRFNASLGTYHDLLKIIKDKDFLDNEENEDILEDIVLTLTLFEDREMIEERLKTYAHLFDDKVMKQLKRRRYTGWGRLSRKLINGIRDKQSGKTILDFLKSDGFANRNFMQLIHDDSLTFKEDIQKAQVSGQGDSLHEHIANLAGSPAIKKGILQTVKVVDELVKVMGRHKPENIVIEMARENQTTQKGQKNSRERMKRIEEGIKELGSQILKEHPVENTQLQNEKLYLYYLQNGRDMYVDQELDINRLSDYDVDAIVPQSFLKDDSIDNKVLTRSDKNRGKSDNVPSEEVVKKMKNYWRQLLNAKLITQRKFDNLTKAERGGLSELDKAGFIKRQLVETRQITKHVAQILDSRMNTKYDENDKLIREVKVITLKSKLVSDFRKDFQFYKVREINNYHHAHDAYLNAVVGTALIKKYPKLESEFVYGDYKVYDVRKMIAKSEQEIGKATAKYFFYSNIMNFFKTEITLANGEIRKRPLIETNGETGEIVWDKGRDFATVRKVLSMPQVNIVKKTEVQTGGFSKESILPKRNSDKLIARKKDWDPKKYGGFDSPTVAYSVLVVAKVEKGKSKKLKSVKELLGITIMERSSFEKNPIDFLEAKGYKEVKKDLIIKLPKYSLFELENGRKRMLASAGELQKGNELALPSKYVNFLYLASHYEKLKGSPEDNEQKQLFVEQHKHYLDEIIEQISEFSKRVILADANLDKVLSAYNKHRDKPIREQAENIIHLFTLTNLGAPAAFKYFDTTIDRKRYTSTKEVLDATLIHQSITGLYETRIDLSQLGGDSGGSSGGSSGGSSGGSSGGSSGGSSGGSSGGSTLNIEDEYRLHETSKEPDVSLGSTWLSDFPQAWAETGGMGLAVRQAPLIIPLKATSTPVSIKQYPMSQEARLGIKPHIQRLLDQGILVPCQSPWNTPLLPVKKPGTNDYRPVQDLREVNKRVEDIHPTVPNPYNLLSGLPPSHQWYTVLDLKDAFFCLRLHPTSQPLFAFEWRDPEMGISGQLTWTRLPQGFKNSPTLFNEALHRDLADFRIQHPDLILLQYVDDLLLAATSELDCQQGTRALLQTLGNLGYRASAKKAQICQKQVKYLGYLLKEGQRWLTEARKETVMGQPTPKTPRQLREFLGKAGFCRLFIPGFAEMAAPLYPLTKPGTLFNWGPDQQKAYQEIKQALLTAPALGLPDLTKPFELFVDEKQGYAKGVLTQKLGPWRRPVAYLSKKLDPVAAGWPPCLRMVAAIAVLTKDAGKLTMGQPLVILAPHAVEALVKQPPDRWLSNARMTHYQALLLDTDRVQFGPVVALNPATLLPLPEEGLQHNCLDILAEAHGTRPDLTDQPLPDADHTWYTDGSSLLQEGQRKAGAAVTTETEVIWAKALPAGTSAQRAELIALTQALKMAEGKKLNVYTDSRYAFATAHIHGEIYRRRGWLTSEGKEIKNKDEILALLKALFLPKRLSIIHCPGHQKGHSAEARGNRMADQAARKAAITETPDTSTLLIENSSPSGGSKRTADGSEFEPKKKRKV

SEQ ID NO: 78 - protein, 2076 aa, synthetic construct
  REGION 1..2076: note = Description of Artificial Sequence: Synthetic polypeptide
DKKYSIGLDIGTNSVGWAVITDEYKVPSKKFKVLGNTDRHSIKKNLIGALLFDSGETAEATRLKRTARRRYTRRKNRICYLQEIFSNEMAKVDDSFFHRLEESFLVEEDKKHERHPIFGNIVDEVAYHEKYPTIYHLRKKLVDSTDKADLRLIYLALAHMIKFRGHFLIEGDLNPDNSDVDKLFIQLVQTYNQLFEENPINASGVDAKAILSARLSKSRRLENLIAQLPGEKKNGLFGNLIALSLGLTPNFKSNFDLAEDAKLQLSKDTYDDDLDNLLAQIGDQYADLFLAAKNLSDAILLSDILRVNTEITKAPLSASMIKRYDEHHQDLTLLKALVRQQLPEKYKEIFFDQSKNGYAGYIDGGASQEEFYKFIKPILEKMDGTEELLVKLNREDLLRKQRTFDNGSIPHQIHLGELHAILRRQEDFYPFLKDNREKIEKILTFRIPYYVGPLARGNSRFAWMTRKSEETITPWNFEEVVDKGASAQSFIERMTNFDKNLPNEKVLPKHSLLYEYFTVYNELTKVKYVTEGMRKPAFLSGEQKKAIVDLLFKTNRKVTVKQLKEDYFKKIECFDSVEISGVEDRFNASLGTYHDLLKIIKDKDFLDNEENEDILEDIVLTLTLFEDREMIEERLKTYAHLFDDKVMKQLKRRRYTGWGRLSRKLINGIRDKQSGKTILDFLKSDGFANRNFMQLIHDDSLTFKEDIQKAQVSGQGDSLHEHIANLAGSPAIKKGILQTVKVVDELVKVMGRHKPENIVIEMARENQTTQKGQKNSRERMKRIEEGIKELGSQILKEHPVENTQLQNEKLYLYYLQNGRDMYVDQELDINRLSDYDVDAIVPQSFLKDDSIDNKVLTRSDKNRGKSDNVPSEEVVKKMKNYWRQLLNAKLITQRKFDNLTKAERGGLSELDKAGFIKRQLVETRQITKHVAQILDSRMNTKYDENDKLIREVKVITLKSKLVSDFRKDFQFYKVREINNYHHAHDAYLNAVVGTALIKKYPKLESEFVYGDYKVYDVRKMIAKSEQEIGKATAKYFFYSNIMNFFKTEITLANGEIRKRPLIETNGETGEIVWDKGRDFATVRKVLSMPQVNIVKKTEVQTGGFSKESILPKRNSDKLIARKKDWDPKKYGGFDSPTVAYSVLVVAKVEKGKSKKLKSVKELLGITIMERSSFEKNPIDFLEAKGYKEVKKDLIIKLPKYSLFELENGRKRMLASAGELQKGNELALPSKYVNFLYLASHYEKLKGSPEDNEQKQLFVEQHKHYLDEIIEQISEFSKRVILADANLDKVLSAYNKHRDKPIREQAENIIHLFTLTNLGAPAAFKYFDTTIDRKRYTSTKEVLDATLIHQSITGLYETRIDLSQLGGDSGGSSGGSSGGSSGGSSGGSSGGSSGGSSGGSTLNIEDEYRLHETSKEPDVSLGSTWLSDFPQAWAETGGMGLAVRQAPLIIPLKATSTPVSIKQYPMSQEARLGIKPHIQRLLDQGILVPCQSPWNTPLLPVKKPGTNDYRPVQDLREVNKRVEDIHPTVPNPYNLLSGLPPSHQWYTVLDLKDAFFCLRLHPTSQPLFAFEWRDPEMGISGQLTWTRLPQGFKNSPTLFNEALHRDLADFRIQHPDLILLQYVDDLLLAATSELDCQQGTRALLQTLGNLGYRASAKKAQICQKQVKYLGYLLKEGQRWLTEARKETVMGQPTPKTPRQLREFLGKAGFCRLFIPGFAEMAAPLYPLTKPGTLFNWGPDQQKAYQEIKQALLTAPALGLPDLTKPFELFVDEKQGYAKGVLTQKLGPWRRPVAYLSKKLDPVAAGWPPCLRMVAAIAVLTKDAGKLTMGQPLVILAPHAVEALVKQPPDRWLSNARMTHYQALLLDTDRVQFGPVVALNPATLLPLPEEGLQHNCLDILAEAHGTRPDLTDQPLPDADHTWYTDGSSLLQEGQRKAGAAVTTETEVIWAKALPAGTSAQRAELIALTQALKMAEGKKLNVYTDSRYAFATAHIHGEIYRRRGWLTSEGKEIKNKDEILALLKALFLPKRLSIIHCPGHQKGHSAEARGNRMADQAARKAAITETPDTSTLLIENSSP

SEQ ID NO: 79 - DNA, 6348 bp, synthetic construct
  misc_feature 1..6348: note = Description of Artificial Sequence: Synthetic polynucleotide
  source 1..6348: mol_type = other DNA
atgaaacggacagccgacggaagcgagttcgagtcaccaaagaagaagcggaaagtcgacaagaagtacagcatcggcctggacatcggcaccaactctgtgggctgggccgtgatcaccgacgagtacaaggtgcccagcaagaaattcaaggtgctgggcaacaccgaccggcacagcatcaagaagaacctgatcggagccctgctgttcgacagcggcgaaacagccgaggccacccggctgaagagaaccgccagaagaagatacaccagacggaagaaccggatctgctatctgcaagagatcttcagcaacgagatggccaaggtggacgacagcttcttccacagactggaagagtccttcctggtggaagaggataagaagcacgagcggcaccccatcttcggcaacatcgtggacgaggtggcctaccacgagaagtaccccaccatctaccacctgagaaagaaactggtggacagcaccgacaaggccgacctgcggctgatctatctggccctggcccacatgatcaagttccggggccacttcctgatcgagggcgacctgaaccccgacaacagcgacgtggacaagctgttcatccagctggtgcagacctacaaccagctgttcgaggaaaaccccatcaacgccagcggcgtggacgccaaggccatcctgtctgccagactgagcaagagcagacggctggaaaatctgatcgcccagctgcccggcgagaagaagaatggcctgttcggaaacctgattgccctgagcctgggcctgacccccaacttcaagagcaacttcgacctggccgaggatgccaaactgcagctgagcaaggacacctacgacgacgacctggacaacctgctggcccagatcggcgaccagtacgccgacctgtttctggccgccaagaacctgtccgacgccatcctgctgagcgacatcctgagagtgaacaccgagatcaccaaggcccccctgagcgcctctatgatcaagagatacgacgagcaccaccaggacctgaccctgctgaaagctctcgtgcggcagcagctgcctgagaagtacaaagagattttcttcgaccagagcaagaacggctacgccggctacattgacggcggagccagccaggaagagttctacaagttcatcaagcccatcctggaaaagatggacggcaccgaggaactgctcgtgaagctgaacagagaggacctgctgcggaagcagcggaccttcgacaacggcagcatcccccaccagatccacctgggagagctgcacgccattctgcggcggcaggaagatttttacccattcctgaaggacaaccgggaaaagatcgagaagatcctgaccttccgcatcccctactacgtgggccctctggccaggggaaacagcagattcgcctggatgaccagaaagagcgaggaaaccatcaccccctggaacttcgaggaagtggtggacaagggcgcttccgcccagagcttcatcgagcggatgaccaacttcgataagaacctgcccaacgagaaggtgctgcccaagcacagcctgctgtacgagtacttcaccgtgtataacgagctgaccaaagtgaaatacgtgaccgagggaatgagaaagcccgccttcctgagcggcgagcagaaaaaggccatcgtggacctgctgttcaagaccaaccggaaagtgaccgtgaagcagctgaaagaggactacttcaagaaaatcgagtgcttcgactccgtggaaatctccggcgtggaagatcggttcaacgcctccctgggcacataccacgatctgctgaaaattatcaaggacaaggacttcctggacaatgaggaaaacgaggacattctggaagatatcgtgctgaccctgacactgtttgaggacagagagatgatcgaggaacggctgaaaacctatgcccacctgttcgacgacaaagtgatgaagcagctgaagcggcggagatacaccggctggggcaggctgagccggaagctgatcaacggcatccgggacaagcagtccggcaagacaatcctggatttcctgaagtccgacggcttcgccaacagaaacttcatgcagctgatccacgacgacagcctgacctttaaagaggacatccagaaagcccaggtgtccggccagggcgatagcctgcacgagcacattgccaatctggccggcagccccgccattaagaagggcatcctgcagacagtgaaggtggtggacgagctcgtgaaagtgatgggccggcacaagcccgagaacatcgtgatcgaaatggccagagagaaccagaccacccagaagggacagaagaacagccgcgagagaatgaagcggatcgaagagggcatcaaagagctgggcagccagatcctgaaagaacaccccgtggaaaacacccagctgcagaacgagaagctgtacctgtactacctgcagaatgggcgggatatgtacgtggaccaggaactggacatcaaccggctgtccgactacgatgtggacgctatcgtgcctcagagctttctgaaggacgactccatcgacaacaaggtgctgaccagaagcgacaagaaccggggcaagagcgacaacgtgccctccgaagaggtcgtgaagaagatgaagaactactggcggcagctgctgaacgccaagctgattacccagagaaagttcgacaatctgaccaaggccgagagaggcggcctgagcgaactggataaggccggcttcatcaagagacagctggtggaaacccggcagatcacaaagcacgtggcacagatcctggactcccggatgaacactaagtacgacgagaatgacaagctgatccgggaagtgaaagtgatcaccctgaagtccaagctggtgtccgatttccggaaggatttccagttttacaaagtgcgcgagatcaacaactaccaccacgcccacgacgcctacctgaacgccgtcgtgggaaccgccctgatcaaaaagtaccctaagctggaaagcgagttcgtgtacggcgactacaaggtgtacgacgtgcggaagatgatcgccaagagcgagcaggaaatcggcaaggctaccgccaagtacttcttctacagcaacatcatgaactttttcaagaccgagattaccctggccaacggcgagatccggaagcggcctctgatcgagacaaacggcgaaaccggggagatcgtgtgggataagggccgggattttgccaccgtgcggaaagtgctgagcatgccccaagtgaatatcgtgaaaaagaccgaggtgcagacaggcggcttcagcaaagagtctatcctgcccaagaggaacagcgataagctgatcgccagaaagaaggactgggaccctaagaagtacggcggcttcgacagccccaccgtggcctattctgtgctggtggtggccaaagtggaaaagggcaagtccaagaaactgaagagtgtgaaagagctgctggggatcaccatcatggaaagaagcagcttcgagaagaatcccatcgactttctggaagccaagggctacaaagaagtgaaaaaggacctgatcatcaagctgcctaagtactccctgttcgagctggaaaacggccggaagagaatgctggcctctgccggcgaactgcagaagggaaacgaactggccctgccctccaaatatgtgaacttcctgtacctggccagccactatgagaagctgaagggctcccccgaggataatgagcagaaacagctgtttgtggaacagcacaagcactacctggacgagatcatcgagcagatcagcgagttctccaagagagtgatcctggccgacgctaatctggacaaagtgctgtccgcctacaacaagcaccgggataagcccatcagagagcaggccgagaatatcatccacctgtttaccctgaccaatctgggagcccctgccgccttcaagtactttgacaccaccatcgaccggaagaggtacaccagcaccaaagaggtgctggacgccaccctgatccaccagagcatcaccggcctgtacgagacacggatcgacctgtctcagctgggaggtgactccggcggctcctccggcggaagcagcggcggcagcagcggcggaagcagcggcggcagcagcggcggaagctctggcggatctagcggcggctctaccctgaacatcgaggacgagtacaggctgcacgagaccagcaaggagcccgacgtgagcctgggcagcacctggctgagcgatttccctcaggcttgggccgagaccggcggcatgggcctggccgtgcggcaggcccccctgattatccccctgaaggccaccagcacccccgtgagcatcaagcagtacccaatgtcccaggaggccaggctgggcatcaagcctcacatccagaggctgctggaccagggcatcctggtgccatgccagtccccctggaacacccctctgctgcccgtgaagaagcctggcaccaacgactaccggcccgtgcaggacctgagagaagtgaacaagcgggtggaggacatccacccaaccgtgcccaacccttacaacctgctgtccggcctgccccccagccaccagtggtacaccgtgctggacctgaaggacgccttcttctgcctgagactgcaccccacctctcagcccctgttcgccttcgagtggcgcgaccccgagatgggcatcagcggccagctgacctggaccagactgccacagggctttaagaatagcccaaccctgtttaacgaggccctgcacagggacctggccgacttcaggatccagcaccccgacctgattctgctgcagtacgtggacgacctgctgctggccgctaccagcgagctggactgccagcagggcaccagagccctgctgcagaccctgggcaacctgggctacagagccagcgccaagaaggcccagatctgtcagaagcaggtgaagtatctgggctacctgctgaaggaaggccagagatggctgaccgaggccagaaaggagactgtgatgggccagcccacccccaagacccccaggcagctgcgggagttcctgggcaaggccggcttttgcagactgtttatccctggcttcgccgagatggccgccccactgtaccctctgaccaagcctggcaccctgtttaactggggccccgaccagcagaaggcctaccaggagatcaagcaggccctgctgaccgcccccgccctgggcctgcccgacctgaccaagcctttcgagctgttcgtggacgagaagcagggatacgccaaaggcgtgctgacccagaagctgggcccctggcggaggcccgtggcctacctgagcaaaaaactggaccctgtggccgccggctggcccccatgcctgcggatggtggccgccatcgctgtgctgaccaaggacgccggcaagctgaccatgggccagcccctggtgatcctggcccctcacgccgtggaggctctggtgaagcagcctccagacaggtggctgtccaacgccaggatgacccactaccaggccctgctgctggacaccgaccgggtgcagttcggccctgtggtggccctgaaccccgccaccctgctgcctctgccagaggagggcctgcagcacaactgcctggacatcctggccgaggcccacggcaccaggcccgacctgaccgaccagcccctgcctgacgccgaccacacctggtacaccgacggcagctccctgctgcaggagggccagaggaaggccggcgccgccgtgaccaccgagaccgaggtgatctgggccaaagccctgcctgccggcacctccgcccagcgggccgagctgatcgccctgacccaggccctgaagatggctgagggcaagaagctgaacgtgtacaccgattccagatacgccttcgccaccgcccacatccacggcgagatctacagaagaaggggctggctgacctccgagggcaaggagatcaagaacaaggacgagattctggccctgctgaaggccctgttcctgcctaagagactgagcatcatccactgtcccggccaccagaagggccacagcgccgaggccagaggcaatagaatggccgaccaggccgccagaaaggccgccatcaccgagacccccgacaccagcaccctgctgatcgagaacagcagccccagcggcggctccaaacgcaccgccgacgggagcgagttcgagcccaagaagaagaggaaagtc

SEQ ID NO: 80 - RNA, 6348 nt, synthetic construct
  misc_feature 1..6348: note = Description of Artificial Sequence: Synthetic polynucleotide
  source 1..6348: mol_type = other RNA
atgaaacggacagccgacggaagcgagttcgagtcaccaaagaagaagcggaaagtcgacaagaagtacagcatcggcctggacatcggcaccaactctgtgggctgggccgtgatcaccgacgagtacaaggtgcccagcaagaaattcaaggtgctgggcaacaccgaccggcacagcatcaagaagaacctgatcggagccctgctgttcgacagcggcgaaacagccgaggccacccggctgaagagaaccgccagaagaagatacaccagacggaagaaccggatctgctatctgcaagagatcttcagcaacgagatggccaaggtggacgacagcttcttccacagactggaagagtccttcctggtggaagaggataagaagcacgagcggcaccccatcttcggcaacatcgtggacgaggtggcctaccacgagaagtaccccaccatctaccacctgagaaagaaactggtggacagcaccgacaaggccgacctgcggctgatctatctggccctggcccacatgatcaagttccggggccacttcctgatcgagggcgacctgaaccccgacaacagcgacgtggacaagctgttcatccagctggtgcagacctacaaccagctgttcgaggaaaaccccatcaacgccagcggcgtggacgccaaggccatcctgtctgccagactgagcaagagcagacggctggaaaatctgatcgcccagctgcccggcgagaagaagaatggcctgttcggaaacctgattgccctgagcctgggcctgacccccaacttcaagagcaacttcgacctggccgaggatgccaaactgcagctgagcaaggacacctacgacgacgacctggacaacctgctggcccagatcggcgaccagtacgccgacctgtttctggccgccaagaacctgtccgacgccatcctgctgagcgacatcctgagagtgaacaccgagatcaccaaggcccccctgagcgcctctatgatcaagagatacgacgagcaccaccaggacctgaccctgctgaaagctctcgtgcggcagcagctgcctgagaagtacaaagagattttcttcgaccagagcaagaacggctacgccggctacattgacggcggagccagccaggaagagttctacaagttcatcaagcccatcctggaaaagatggacggcaccgaggaactgctcgtgaagctgaacagagaggacctgctgcggaagcagcggaccttcgacaacggcagcatcccccaccagatccacctgggagagctgcacgccattctgcggcggcaggaagatttttacccattcctgaaggacaaccgggaaaagatcgagaagatcctgaccttccgcatcccctactacgtgggccctctggccaggggaaacagcagattcgcctggatgaccagaaagagcgaggaaaccatcaccccctggaacttcgaggaagtggtggacaagggcgcttccgcccagagcttcatcgagcggatgaccaacttcgataagaacctgcccaacgagaaggtgctgcccaagcacagcctgctgtacgagtacttcaccgtgtataacgagctgaccaaagtgaaatacgtgaccgagggaatgagaaagcccgccttcctgagcggcgagcagaaaaaggccatcgtggacctgctgttcaagaccaaccggaaagtgaccgtgaagcagctgaaagaggactacttcaagaaaatcgagtgcttcgactccgtggaaatctccggcgtggaagatcggttcaacgcctccctgggcacataccacgatctgctgaaaattatcaaggacaaggacttcctggacaatgaggaaaacgaggacattctggaagatatcgtgctgaccctgacactgtttgaggacagagagatgatcgaggaacggctgaaaacctatgcccacctgttcgacgacaaagtgatgaagcagctgaagcggcggagatacaccggctggggcaggctgagccggaagctgatcaacggcatccgggacaagcagtccggcaagacaatcctggatttcctgaagtccgacggcttcgccaacagaaacttcatgcagctgatccacgacgacagcctgacctttaaagaggacatccagaaagcccaggtgtccggccagggcgatagcctgcacgagcacattgccaatctggccggcagccccgccattaagaagggcatcctgcagacagtgaaggtggtggacgagctcgtgaaagtgatgggccggcacaagcccgagaacatcgtgatcgaaatggccagagagaaccagaccacccagaagggacagaagaacagccgcgagagaatgaagcggatcgaagagggcatcaaagagctgggcagccagatcctgaaagaacaccccgtggaaaacacccagctgcagaacgagaagctgtacctgtactacctgcagaatgggcgggatatgtacgtggaccaggaactggacatcaaccggctgtccgactacgatgtggacgctatcgtgcctcagagctttctgaaggacgactccatcgacaacaaggtgctgaccagaagcgacaagaaccggggcaagagcgacaacgtgccctccgaagaggtcgtgaagaagatgaagaactactggcggcagctgctgaacgccaagctgattacccagagaaagttcgacaatctgaccaaggccgagagaggcggcctgagcgaactggataaggccggcttcatcaagagacagctggtggaaacccggcagatcacaaagcacgtggcacagatcctggactcccggatgaacactaagtacgacgagaatgacaagctgatccgggaagtgaaagtgatcaccctgaagtccaagctggtgtccgatttccggaaggatttccagttttacaaagtgcgcgagatcaacaactaccaccacgcccacgacgcctacctgaacgccgtcgtgggaaccgccctgatcaaaaagtaccctaagctggaaagcgagttcgtgtacggcgactacaaggtgtacgacgtgcggaagatgatcgccaagagcgagcaggaaatcggcaaggctaccgccaagtacttcttctacagcaacatcatgaactttttcaagaccgagattaccctggccaacggcgagatccggaagcggcctctgatcgagacaaacggcgaaaccggggagatcgtgtgggataagggccgggattttgccaccgtgcggaaagtgctgagcatgccccaagtgaatatcgtgaaaaagaccgaggtgcagacaggcggcttcagcaaagagtctatcctgcccaagaggaacagcgataagctgatcgccagaaagaaggactgggaccctaagaagtacggcggcttcgacagccccaccgtggcctattctgtgctggtggtggccaaagtggaaaagggcaagtccaagaaactgaagagtgtgaaagagctgctggggatcaccatcatggaaagaagcagcttcgagaagaatcccatcgactttctggaagccaagggctacaaagaagtgaaaaaggacctgatcatcaagctgcctaagtactccctgttcgagctggaaaacggccggaagagaatgctggcctctgccggcgaactgcagaagggaaacgaactggccctgccctccaaatatgtgaacttcctgtacctggccagccactatgagaagctgaagggctcccccgaggataatgagcagaaacagctgtttgtggaacagcacaagcactacctggacgagatcatcgagcagatcagcgagttctccaagagagtgatcctggccgacgctaatctggacaaagtgctgtccgcctacaacaagcaccgggataagcccatcagagagcaggccgagaatatcatccacctgtttaccctgaccaatctgggagcccctgccgccttcaagtactttgacaccaccatcgaccggaagaggtacaccagcaccaaagaggtgctggacgccaccctgatccaccagagcatcaccggcctgtacgagacacggatcgacctgtctcagctgggaggtgactccggcggctcctccggcggaagcagcggcggcagcagcggcggaagcagcggcggcagcagcggcggaagctctggcggatctagcggcggctctaccctgaacatcgaggacgagtacaggctgcacgagaccagcaaggagcccgacgtgagcctgggcagcacctggctgagcgatttccctcaggcttgggccgagaccggcggcatgggcctggccgtgcggcaggcccccctgattatccccctgaaggccaccagcacccccgtgagcatcaagcagtacccaatgtcccaggaggccaggctgggcatcaagcctcacatccagaggctgctggaccagggcatcctggtgccatgccagtccccctggaacacccctctgctgcccgtgaagaagcctggcaccaacgactaccggcccgtgcaggacctgagagaagtgaacaagcgggtggaggacatccacccaaccgtgcccaacccttacaacctgctgtccggcctgccccccagccaccagtggtacaccgtgctggacctgaaggacgccttcttctgcctgagactgcaccccacctctcagcccctgttcgccttcgagtggcgcgaccccgagatgggcatcagcggccagctgacctggaccagactgccacagggctttaagaatagcccaaccctgtttaacgaggccctgcacagggacctggccgacttcaggatccagcaccccgacctgattctgctgcagtacgtggacgacctgctgctggccgctaccagcgagctggactgccagcagggcaccagagccctgctgcagaccctgggcaacctgggctacagagccagcgccaagaaggcccagatctgtcagaagcaggtgaagtatctgggctacctgctgaaggaaggccagagatggctgaccgaggccagaaaggagactgtgatgggccagcccacccccaagacccccaggcagctgcgggagttcctgggcaaggccggcttttgcagactgtttatccctggcttcgccgagatggccgccccactgtaccctctgaccaagcctggcaccctgtttaactggggccccgaccagcagaaggcctaccaggagatcaagcaggccctgctgaccgcccccgccctgggcctgcccgacctgaccaagcctttcgagctgttcgtggacgagaagcagggatacgccaaaggcgtgctgacccagaagctgggcccctggcggaggcccgtggcctacctgagcaaaaaactggaccctgtggccgccggctggcccccatgcctgcggatggtggccgccatcgctgtgctgaccaaggacgccggcaagctgaccatgggccagcccctggtgatcctggcccctcacgccgtggaggctctggtgaagcagcctccagacaggtggctgtccaacgccaggatgacccactaccaggccctgctgctggacaccgaccgggtgcagttcggccctgtggtggccctgaaccccgccaccctgctgcctctgccagaggagggcctgcagcacaactgcctggacatcctggccgaggcccacggcaccaggcccgacctgaccgaccagcccctgcctgacgccgaccacacctggtacaccgacggcagctccctgctgcaggagggccagaggaaggccggcgccgccgtgaccaccgagaccgaggtgatctgggccaaagccctgcctgccggcacctccgcccagcgggccgagctgatcgccctgacccaggccctgaagatggctgagggcaagaagctgaacgtgtacaccgattccagatacgccttcgccaccgcccacatccacggcgagatctacagaagaaggggctggctgacctccgagggcaaggagatcaagaacaaggacgagattctggccctgctgaaggccctgttcctgcctaagagactgagcatcatccactgtcccggccaccagaagggccacagcgccgaggccagaggcaatagaatggccgaccaggccgccagaaaggccgccatcaccgagacccccgacaccagcaccctgctgatcgagaacagcagccccagcggcggctccaaacgcaccgccgacgggagcgagttcgagcccaagaagaagaggaaagtc

SEQ ID NO: 81 - DNA, 6228 bp, synthetic construct
  misc_feature 1..6228: note = Description of Artificial Sequence: Synthetic polynucleotide
  source 1..6228: mol_type = other DNA
gacaagaagtacagcatcggcctggacatcggcaccaactctgtgggctgggccgtgatcaccgacgagtacaaggtgcccagcaagaaattcaaggtgctgggcaacaccgaccggcacagcatcaagaagaacctgatcggagccctgctgttcgacagcggcgaaacagccgaggccacccggctgaagagaaccgccagaagaagatacaccagacggaagaaccggatctgctatctgcaagagatcttcagcaacgagatggccaaggtggacgacagcttcttccacagactggaagagtccttcctggtggaagaggataagaagcacgagcggcaccccatcttcggcaacatcgtggacgaggtggcctaccacgagaagtaccccaccatctaccacctgagaaagaaactggtggacagcaccgacaaggccgacctgcggctgatctatctggccctggcccacatgatcaagttccggggccacttcctgatcgagggcgacctgaaccccgacaacagcgacgtggacaagctgttcatccagctggtgcagacctacaaccagctgttcgaggaaaaccccatcaacgccagcggcgtggacgccaaggccatcctgtctgccagactgagcaagagcagacggctggaaaatctgatcgcccagctgcccggcgagaagaagaatggcctgttcggaaacctgattgccctgagcctgggcctgacccccaacttcaagagcaacttcgacctggccgaggatgccaaactgcagctgagcaaggacacctacgacgacgacctggacaacctgctggcccagatcggcgaccagtacgccgacctgtttctggccgccaagaacctgtccgacgccatcctgctgagcgacatcctgagagtgaacaccgagatcaccaaggcccccctgagcgcctctatgatcaagagatacgacgagcaccaccaggacctgaccctgctgaaagctctcgtgcggcagcagctgcctgagaagtacaaagagattttcttcgaccagagcaagaacggctacgccggctacattgacggcggagccagccaggaagagttctacaagttcatcaagcccatcctggaaaagatggacggcaccgaggaactgctcgtgaagctgaacagagaggacctgctgcggaagcagcggaccttcgacaacggcagcatcccccaccagatccacctgggagagctgcacgccattctgcggcggcaggaagatttttacccattcctgaaggacaaccgggaaaagatcgagaagatcctgaccttccgcatcccctactacgtgggccctctggccaggggaaacagcagattcgcctggatgaccagaaagagcgaggaaaccatcaccccctggaacttcgaggaagtggtggacaagggcgcttccgcccagagcttcatcgagcggatgaccaacttcgataagaacctgcccaacgagaaggtgctgcccaagcacagcctgctgtacgagtacttcaccgtgtataacgagctgaccaaagtgaaatacgtgaccgagggaatgagaaagcccgccttcctgagcggcgagcagaaaaaggccatcgtggacctgctgttcaagaccaaccggaaagtgaccgtgaagcagctgaaagaggactacttcaagaaaatcgagtgcttcgactccgtggaaatctccggcgtggaagatcggttcaacgcctccctgggcacataccacgatctgctgaaaattatcaaggacaaggacttcctggacaatgaggaaaacgaggacattctggaagatatcgtgctgaccctgacactgtttgaggacagagagatgatcgaggaacggctgaaaacctatgcccacctgttcgacgacaaagtgatgaagcagctgaagcggcggagatacaccggctggggcaggctgagccggaagctgatcaacggcatccgggacaagcagtccggcaagacaatcctggatttcctgaagtccgacggcttcgccaacagaaacttcatgcagctgatccacgacgacagcctgacctttaaagaggacatccagaaagcccaggtgtccggccagggcgatagcctgcacgagcacattgccaatctggccggcagccccgccattaagaagggcatcctgcagacagtgaaggtggtggacgagctcgtgaaagtgatgggccggcacaagcccgagaacatcgtgatcgaaatggccagagagaaccagaccacccagaagggacagaagaacagccgcgagagaatgaagcggatcgaagagggcatcaaagagctgggcagccagatcctgaaagaacaccccgtggaaaacacccagctgcagaacgagaagctgtacctgtactacctgcagaatgggcgggatatgtacgtggaccaggaactggacatcaaccggctgtccgactacgatgtggacgctatcgtgcctcagagctttctgaaggacgactccatcgacaacaaggtgctgaccagaagcgacaagaaccggggcaagagcgacaacgtgccctccgaagaggtcgtgaagaagatgaagaactactggcggcagctgctgaacgccaagctgattacccagagaaagttcgacaatctgaccaaggccgagagaggcggcctgagcgaactggataaggccggcttcatcaagagacagctggtggaaacccggcagatcacaaagcacgtggcacagatcctggactcccggatgaacactaagtacgacgagaatgacaagctgatccgggaagtgaaagtgatcaccctgaagtccaagctggtgtccgatttccggaaggatttccagttttacaaagtgcgcgagatcaacaactaccaccacgcccacgacgcctacctgaacgccgtcgtgggaaccgccctgatcaaaaagtaccctaagctggaaagcgagttcgtgtacggcgactacaaggtgtacgacgtgcggaagatgatcgccaagagcgagcaggaaatcggcaaggctaccgccaagtacttcttctacagcaacatcatgaactttttcaagaccgagattaccctggccaacggcgagatccggaagcggcctctgatcgagacaaacggcgaaaccggggagatcgtgtgggataagggccgggattttgccaccgtgcggaaagtgctgagcatgccccaagtgaatatcgtgaaaaagaccgaggtgcagacaggcggcttcagcaaagagtctatcctgcccaagaggaacagcgataagctgatcgccagaaagaaggactgggaccctaagaagtacggcggcttcgacagccccaccgtggcctattctgtgctggtggtggccaaagtggaaaagggcaagtccaagaaactgaagagtgtgaaagagctgctggggatcaccatcatggaaagaagcagcttcgagaagaatcccatcgactttctggaagccaagggctacaaagaagtgaaaaaggacctgatcatcaagctgcctaagtactccctgttcgagctggaaaacggccggaagagaatgctggcctctgccggcgaactgcagaagggaaacgaactggccctgccctccaaatatgtgaacttcctgtacctggccagccactatgagaagctgaagggctcccccgaggataatgagcagaaacagctgtttgtggaacagcacaagcactacctggacgagatcatcgagcagatcagcgagttctccaagagagtgatcctggccgacgctaatctggacaaagtgctgtccgcctacaacaagcaccgggataagcccatcagagagcaggccgagaatatcatccacctgtttaccctgaccaatctgggagcccctgccgccttcaagtactttgacaccaccatcgaccggaagaggtacaccagcaccaaagaggtgctggacgccaccctgatccaccagagcatcaccggcctgtacgagacacggatcgacctgtctcagctgggaggtgactccggcggctcctccggcggaagcagcggcggcagcagcggcggaagcagcggcggcagcagcggcggaagctctggcggatctagcggcggctctaccctgaacatcgaggacgagtacaggctgcacgagaccagcaaggagcccgacgtgagcctgggcagcacctggctgagcgatttccctcaggcttgggccgagaccggcggcatgggcctggccgtgcggcaggcccccctgattatccccctgaaggccaccagcacccccgtgagcatcaagcagtacccaatgtcccaggaggccaggctgggcatcaagcctcacatccagaggctgctggaccagggcatcctggtgccatgccagtccccctggaacacccctctgctgcccgtgaagaagcctggcaccaacgactaccggcccgtgcaggacctgagagaagtgaacaagcgggtggaggacatccacccaaccgtgcccaacccttacaacctgctgtccggcctgccccccagccaccagtggtacaccgtgctggacctgaaggacgccttcttctgcctgagactgcaccccacctctcagcccctgttcgccttcgagtggcgcgaccccgagatgggcatcagcggccagctgacctggaccagactgccacagggctttaagaatagcccaaccctgtttaacgaggccctgcacagggacctggccgacttcaggatccagcaccccgacctgattctgctgcagtacgtggacgacctgctgctggccgctaccagcgagctggactgccagcagggcaccagagccctgctgcagaccctgggcaacctgggctacagagccagcgccaagaaggcccagatctgtcagaagcaggtgaagtatctgggctacctgctgaaggaaggccagagatggctgaccgaggccagaaaggagactgtgatgggccagcccacccccaagacccccaggcagctgcgggagttcctgggcaaggccggcttttgcagactgtttatccctggcttcgccgagatggccgccccactgtaccctctgaccaagcctggcaccctgtttaactggggccccgaccagcagaaggcctaccaggagatcaagcaggccctgctgaccgcccccgccctgggcctgcccgacctgaccaagcctttcgagctgttcgtggacgagaagcagggatacgccaaaggcgtgctgacccagaagctgggcccctggcggaggcccgtggcctacctgagcaaaaaactggaccctgtggccgccggctggcccccatgcctgcggatggtggccgccatcgctgtgctgaccaaggacgccggcaagctgaccatgggccagcccctggtgatcctggcccctcacgccgtggaggctctggtgaagcagcctccagacaggtggctgtccaacgccaggatgacccactaccaggccctgctgctggacaccgaccgggtgcagttcggccctgtggtggccctgaaccccgccaccctgctgcctctgccagaggagggcctgcagcacaactgcctggacatcctggccgaggcccacggcaccaggcccgacctgaccgaccagcccctgcctgacgccgaccacacctggtacaccgacggcagctccctgctgcaggagggccagaggaaggccggcgccgccgtgaccaccgagaccgaggtgatctgggccaaagccctgcctgccggcacctccgcccagcgggccgagctgatcgccctgacccaggccctgaagatggctgagggcaagaagctgaacgtgtacaccgattccagatacgccttcgccaccgcccacatccacggcgagatctacagaagaaggggctggctgacctccgagggcaaggagatcaagaacaaggacgagattctggccctgctgaaggccctgttcctgcctaagagactgagcatcatccactgtcccggccaccagaagggccacagcgccgaggccagaggcaatagaatggccgaccaggccgccagaaaggccgccatcaccgagacccccgacaccagcaccctgctgatcgagaacagcagcccc

SEQ ID NO: 82 - RNA, 6228 nt, synthetic construct
  misc_feature 1..6228: note = Description of Artificial Sequence: Synthetic polynucleotide
  source 1..6228: mol_type = other RNA
gacaagaagtacagcatcggcctggacatcggcaccaactctgtgggctgggccgtgatcaccgacgagtacaaggtgcccagcaagaaattcaaggtgctgggcaacaccgaccggcacagcatcaagaagaacctgatcggagccctgctgttcgacagcggcgaaacagccgaggccacccggctgaagagaaccgccagaagaagatacaccagacggaagaaccggatctgctatctgcaagagatcttcagcaacgagatggccaaggtggacgacagcttcttccacagactggaagagtccttcctggtggaagaggataagaagcacgagcggcaccccatcttcggcaacatcgtggacgaggtggcctaccacgagaagtaccccaccatctaccacctgagaaagaaactggtggacagcaccgacaaggccgacctgcggctgatctatctggccctggcccacatgatcaagttccggggccacttcctgatcgagggcgacctgaaccccgacaacagcgacgtggacaagctgttcatccagctggtgcagacctacaaccagctgttcgaggaaaaccccatcaacgccagcggcgtggacgccaaggccatcctgtctgccagactgagcaagagcagacggctggaaaatctgatcgcccagctgcccggcgagaagaagaatggcctgttcggaaacctgattgccctgagcctgggcctgacccccaacttcaagagcaacttcgacctggccgaggatgccaaactgcagctgagcaaggacacctacgacgacgacctggacaacctgctggcccagatcggcgaccagtacgccgacctgtttctggccgccaagaacctgtccgacgccatcctgctgagcgacatcctgagagtgaacaccgagatcaccaaggcccccctgagcgcctctatgatcaagagatacgacgagcaccaccaggacctgaccctgctgaaagctctcgtgcggcagcagctgcctgagaagtacaaagagattttcttcgaccagagcaagaacggctacgccggctacattgacggcggagccagccaggaagagttctacaagttcatcaagcccatcctggaaaagatggacggcaccgaggaactgctcgtgaagctgaacagagaggacctgctgcggaagcagcggaccttcgacaacggcagcatcccccaccagatccacctgggagagctgcacgccattctgcggcggcaggaagatttttacccattcctgaaggacaaccgggaaaagatcgagaagatcctgaccttccgcatcccctactacgtgggccctctggccaggggaaacagcagattcgcctggatgaccagaaagagcgaggaaaccatcaccccctggaacttcgaggaagtggtggacaagggcgcttccgcccagagcttcatcgagcggatgaccaacttcgataagaacctgcccaacgagaaggtgctgcccaagcacagcctgctgtacgagtacttcaccgtgtataacgagctgaccaaagtgaaatacgtgaccgagggaatgagaaagcccgccttcctgagcggcgagcagaaaaaggccatcgtggacctgctgttcaagaccaaccggaaagtgaccgtgaagcagctgaaagaggactacttcaagaaaatcgagtgcttcgactccgtggaaatctccggcgtggaagatcggttcaacgcctccctgggcacataccacgatctgctgaaaattatcaaggacaaggacttcctggacaatgaggaaaacgaggacattctggaagatatcgtgctgaccctgacactgtttgaggacagagagatgatcgaggaacggctgaaaacctatgcccacctgttcgacgacaaagtgatgaagcagctgaagcggcggagatacaccggctggggcaggctgagccggaagctgatcaacggcatccgggacaagcagtccggcaagacaatcctggatttcctgaagtccgacggcttcgccaacagaaacttcatgcagctgatccacgacgacagcctgacctttaaagaggacatccagaaagcccaggtgtccggccagggcgatagcctgcacgagcacattgccaatctggccggcagccccgccattaagaagggcatcctgcagacagtgaaggtggtggacgagctcgtgaaagtgatgggccggcacaagcccgagaacatcgtgatcgaaatggccagagagaaccagaccacccagaagggacagaagaacagccgcgagagaatgaagcggatcgaagagggcatcaaagagctgggcagccagatcctgaaagaacaccccgtggaaaacacccagctgcagaacgagaagctgtacctgtactacctgcagaatgggcgggatatgtacgtggaccaggaactggacatcaaccggctgtccgactacgatgtggacgctatcgtgcctcagagctttctgaaggacgactccatcgacaacaaggtgctgaccagaagcgacaagaaccggggcaagagcgacaacgtgccctccgaagaggtcgtgaagaagatgaagaactactggcggcagctgctgaacgccaagctgattacccagagaaagttcgacaatctgaccaaggccgagagaggcggcctgagcgaactggataaggccggcttcatcaagagacagctggtggaaacccggcagatcacaaagcacgtggcacagatcctggactcccggatgaacactaagtacgacgagaatgacaagctgatccgggaagtgaaagtgatcaccctgaagtccaagctggtgtccgatttccggaaggatttccagttttacaaagtgcgcgagatcaacaactaccaccacgcccacgacgcctacctgaacgccgtcgtgggaaccgccctgatcaaaaagtaccctaagctggaaagcgagttcgtgtacggcgactacaaggtgtacgacgtgcggaagatgatcgccaagagcgagcaggaaatcggcaaggctaccgccaagtacttcttctacagcaacatcatgaactttttcaagaccgagattaccctggccaacggcgagatccggaagcggcctctgatcgagacaaacggcgaaaccggggagatcgtgtgggataagggccgggattttgccaccgtgcggaaagtgctgagcatgccccaagtgaatatcgtgaaaaagaccgaggtgcagacaggcggcttcagcaaagagtctatcctgcccaagaggaacagcgataagctgatcgccagaaagaaggactgggaccctaagaagtacggcggcttcgacagccccaccgtggcctattctgtgctggtggtggccaaagtggaaaagggcaagtccaagaaactgaagagtgtgaaagagctgctggggatcaccatcatggaaagaagcagcttcgagaagaatcccatcgactttctggaagccaagggctacaaagaagtgaaaaaggacctgatcatcaagctgcctaagtactccctgttcgagctggaaaacggccggaagagaatgctggcctctgccggcgaactgcagaagggaaacgaactggccctgccctccaaatatgtgaacttcctgtacctggccagccactatgagaagctgaagggctcccccgaggataatgagcagaaacagctgtttgtggaacagcacaagcactacctggacgagatcatcgagcagatcagcgagttctccaagagagtgatcctggccgacgctaatctggacaaagtgctgtccgcctacaacaagcaccgggataagcccatcagagagcaggccgagaatatcatccacctgtttaccctgaccaatctgggagcccctgccgccttcaagtactttgacaccaccatcgaccggaagaggtacaccagcaccaaagaggtgctggacgccaccctgatccaccagagcatcaccggcctgtacgagacacggatcgacctgtctcagctgggaggtgactccggcggctcctccggcggaagcagcggcggcagcagcggcggaagcagcggcggcagcagcggcggaagctctggcggatctagcggcggctctaccctgaacatcgaggacgagtacaggctgcacgagaccagcaaggagcccgacgtgagcctgggcagcacctggctgagcgatttccctcaggcttgggccgagaccggcggcatgggcctggccgtgcggcaggcccccctgattatccccctgaaggccaccagcacccccgtgagcatcaagcagtacccaatgtcccaggaggccaggctgggcatcaagcctcacatccagaggctgctggaccagggcatcctggtgccatgccagtccccctggaacacccctctgctgcccgtgaagaagcctggcaccaacgactaccggcccgtgcaggacctgagagaagtgaacaagcgggtggaggacatccacccaaccgtgcccaacccttacaacctgctgtccggcctgccccccagccaccagtggtacaccgtgctggacctgaaggacgccttcttctgcctgagactgcaccccacctctcagcccctgttcgccttcgagtggcgcgaccccgagatgggcatcagcggccagctgacctggaccagactgccacagggctttaagaatagcccaaccctgtttaacgaggccctgcacagggacctggccgacttcaggatccagcaccccgacctgattctgctgcagtacgtggacgacctgctgctggccgctaccagcgagctggactgccagcagggcaccagagccctgctgcagaccctgggcaacctgggctacagagccagcgccaagaaggcccagatctgtcagaagcaggtgaagtatctgggctacctgctgaaggaaggccagagatggctgaccgaggccagaaaggagactgtgatgggccagcccacccccaagacccccaggcagctgcgggagttcctgggcaaggccggcttttgcagactgtttatccctggcttcgccgagatggccgccccactgtaccctctgaccaagcctggcaccctgtttaactggggccccgaccagcagaaggcctaccaggagatcaagcaggccctgctgaccgcccccgccctgggcctgcccgacctgaccaagcctttcgagctgttcgtggacgagaagcagggatacgccaaaggcgtgctgacccagaagctgggcccctggcggaggcccgtggcctacctgagcaaaaaactggaccctgtggccgccggctggcccccatgcctgcggatggtggccgccatcgctgtgctgaccaaggacgccggcaagctgaccatgggccagcccctggtgatcctggcccctcacgccgtggaggctctggtgaagcagcctccagacaggtggctgtccaacgccaggatgacccactaccaggccctgctgctggacaccgaccgggtgcagttcggccctgtggtggccctgaaccccgccaccctgctgcctctgccagaggagggcctgcagcacaactgcctggacatcctggccgaggcccacggcaccaggcccgacctgaccgaccagcccctgcctgacgccgaccacacctggtacaccgacggcagctccctgctgcaggagggccagaggaaggccggcgccgccgtgaccaccgagaccgaggtgatctgggccaaagccctgcctgccggcacctccgcccagcgggccgagctgatcgccctgacccaggccctgaagatggctgagggcaagaagctgaacgtgtacaccgattccagatacgccttcgccaccgcccacatccacggcgagatctacagaagaaggggctggctgacctccgagggcaaggagatcaagaacaaggacgagattctggccctgctgaaggccctgttcctgcctaagagactgagcatcatccactgtcccggccaccagaagggccacagcgccgaggccagaggcaatagaatggccgaccaggccgccagaaaggccgccatcaccgagacccccgacaccagcaccctgctgatcgagaacagcagcccc

SEQ ID NO: 83 - DNA, 2031 bp, synthetic construct
  misc_feature 1..2031: note = Description of Artificial Sequence: Synthetic polynucleotide
  source 1..2031: mol_type = other DNA
accctgaacatcgaggacgagtacaggctgcacgagaccagcaaggagcccgacgtgagcctgggcagcacctggctgagcgatttccctcaggcttgggccgagaccggcggcatgggcctggccgtgcggcaggcccccctgattatccccctgaaggccaccagcacccccgtgagcatcaagcagtacccaatgtcccaggaggccaggctgggcatcaagcctcacatccagaggctgctggaccagggcatcctggtgccatgccagtccccctggaacacccctctgctgcccgtgaagaagcctggcaccaacgactaccggcccgtgcaggacctgagagaagtgaacaagcgggtggaggacatccacccaaccgtgcccaacccttacaacctgctgtccggcctgccccccagccaccagtggtacaccgtgctggacctgaaggacgccttcttctgcctgagactgcaccccacctctcagcccctgttcgccttcgagtggcgcgaccccgagatgggcatcagcggccagctgacctggaccagactgccacagggctttaagaatagcccaaccctgtttaacgaggccctgcacagggacctggccgacttcaggatccagcaccccgacctgattctgctgcagtacgtggacgacctgctgctggccgctaccagcgagctggactgccagcagggcaccagagccctgctgcagaccctgggcaacctgggctacagagccagcgccaagaaggcccagatctgtcagaagcaggtgaagtatctgggctacctgctgaaggaaggccagagatggctgaccgaggccagaaaggagactgtgatgggccagcccacccccaagacccccaggcagctgcgggagttcctgggcaaggccggcttttgcagactgtttatccctggcttcgccgagatggccgccccactgtaccctctgaccaagcctggcaccctgtttaactggggccccgaccagcagaaggcctaccaggagatcaagcaggccctgctgaccgcccccgccctgggcctgcccgacctgaccaagcctttcgagctgttcgtggacgagaagcagggatacgccaaaggcgtgctgacccagaagctgggcccctggcggaggcccgtggcctacctgagcaaaaaactggaccctgtggccgccggctggcccccatgcctgcggatggtggccgccatcgctgtgctgaccaaggacgccggcaagctgaccatgggccagcccctggtgatcctggcccctcacgccgtggaggctctggtgaagcagcctccagacaggtggctgtccaacgccaggatgacccactaccaggccctgctgctggacaccgaccgggtgcagttcggccctgtggtggccctgaaccccgccaccctgctgcctctgccagaggagggcctgcagcacaactgcctggacatcctggccgaggcccacggcaccaggcccgacctgaccgaccagcccctgcctgacgccgaccacacctggtacaccgacggcagctccctgctgcaggagggccagaggaaggccggcgccgccgtgaccaccgagaccgaggtgatctgggccaaagccctgcctgccggcacctccgcccagcgggccgagctgatcgccctgacccaggccctgaagatggctgagggcaagaagctgaacgtgtacaccgattccagatacgccttcgccaccgcccacatccacggcgagatctacagaagaaggggctggctgacctccgagggcaaggagatcaagaacaaggacgagattctggccctgctgaaggccctgttcctgcctaagagactgagcatcatccactgtcccggccaccagaagggccacagcgccgaggccagaggcaatagaatggccgaccaggccgccagaaaggccgccatcaccgagacccccgacaccagcaccctgctgatcgagaacagcagcccc

SEQ ID NO: 84 - RNA, 2031 nt, synthetic construct
  misc_feature 1..2031: note = Description of Artificial Sequence: Synthetic polynucleotide
  source 1..2031: mol_type = other RNA
accctgaacatcgaggacgagtacaggctgcacgagaccagcaaggagcccgacgtgagcctgggcagcacctggctgagcgatttccctcaggcttgggccgagaccggcggcatgggcctggccgtgcggcaggcccccctgattatccccctgaaggccaccagcacccccgtgagcatcaagcagtacccaatgtcccaggaggccaggctgggcatcaagcctcacatccagaggctgctggaccagggcatcctggtgccatgccagtccccctggaacacccctctgctgcccgtgaagaagcctggcaccaacgactaccggcccgtgcaggacctgagagaagtgaacaagcgggtggaggacatccacccaaccgtgcccaacccttacaacctgctgtccggcctgccccccagccaccagtggtacaccgtgctggacctgaaggacgccttcttctgcctgagactgcaccccacctctcagcccctgttcgccttcgagtggcgcgaccccgagatgggcatcagcggccagctgacctggaccagactgccacagggctttaagaatagcccaaccctgtttaacgaggccctgcacagggacctggccgacttcaggatccagcaccccgacctgattctgctgcagtacgtggacgacctgctgctggccgctaccagcgagctggactgccagcagggcaccagagccctgctgcagaccctgggcaacctgggctacagagccagcgccaagaaggcccagatctgtcagaagcaggtgaagtatctgggctacctgctgaaggaaggccagagatggctgaccgaggccagaaaggagactgtgatgggccagcccacccccaagacccccaggcagctgcgggagttcctgggcaaggccggcttttgcagactgtttatccctggcttcgccgagatggccgccccactgtaccctctgaccaagcctggcaccctgtttaactggggccccgaccagcagaaggcctaccaggagatcaagcaggccctgctgaccgcccccgccctgggcctgcccgacctgaccaagcctttcgagctgttcgtggacgagaagcagggatacgccaaaggcgtgctgacccagaagctgggcccctggcggaggcccgtggcctacctgagcaaaaaactggaccctgtggccgccggctggcccccatgcctgcggatggtggccgccatcgctgtgctgaccaaggacgccggcaagctgaccatgggccagcccctggtgatcctggcccctcacgccgtggaggctctggtgaagcagcctccagacaggtggctgtccaacgccaggatgacccactaccaggccctgctgctggacaccgaccgggtgcagttcggccctgtggtggccctgaaccccgccaccctgctgcctctgccagaggagggcctgcagcacaactgcctggacatcctggccgaggcccacggcaccaggcccgacctgaccgaccagcccctgcctgacgccgaccacacctggtacaccgacggcagctccctgctgcaggagggccagaggaaggccggcgccgccgtgaccaccgagaccgaggtgatctgggccaaagccctgcctgccggcacctccgcccagcgggccgagctgatcgccctgacccaggccctgaagatggctgagggcaagaagctgaacgtgtacaccgattccagatacgccttcgccaccgcccacatccacggcgagatctacagaagaaggggctggctgacctccgagggcaaggagatcaagaacaaggacgagattctggccctgctgaaggccctgttcctgcctaagagactgagcatcatccactgtcccggccaccagaagggccacagcgccgaggccagaggcaatagaatggccgaccaggccgccagaaaggccgccatcaccgagacccccgacaccagcaccctgctgatcgagaacagcagcccc

SEQ ID NO: 85 - protein, 1943 aa, synthetic construct
  REGION 1..1943: note = Description of Artificial Sequence: Synthetic polypeptide
MKRTADGSEFESPKKKRKVDKKYSIGLDIGTNSVGWAVITDEYKVPSKKFKVLGNTDRHSIKKNLIGALLFDSGETAEATRLKRTARRRYTRRKNRICYLQEIFSNEMAKVDDSFFHRLEESFLVEEDKKHERHPIFGNIVDEVAYHEKYPTIYHLRKKLVDSTDKADLRLIYLALAHMIKFRGHFLIEGDLNPDNSDVDKLFIQLVQTYNQLFEENPINASGVDAKAILSARLSKSRRLENLIAQLPGEKKNGLFGNLIALSLGLTPNFKSNFDLAEDAKLQLSKDTYDDDLDNLLAQIGDQYADLFLAAKNLSDAILLSDILRVNTEITKAPLSASMIKRYDEHHQDLTLLKALVRQQLPEKYKEIFFDQSKNGYAGYIDGGASQEEFYKFIKPILEKMDGTEELLVKLNREDLLRKQRTFDNGSIPHQIHLGELHAILRRQEDFYPFLKDNREKIEKILTFRIPYYVGPLARGNSRFAWMTRKSEETITPWNFEEVVDKGASAQSFIERMTNFDKNLPNEKVLPKHSLLYEYFTVYNELTKVKYVTEGMRKPAFLSGEQKKAIVDLLFKTNRKVTVKQLKEDYFKKIECFDSVEISGVEDRFNASLGTYHDLLKIIKDKDFLDNEENEDILEDIVLTLTLFEDREMIEERLKTYAHLFDDKVMKQLKRRRYTGWGRLSRKLINGIRDKQSGKTILDFLKSDGFANRNFMQLIHDDSLTFKEDIQKAQVSGQGDSLHEHIANLAGSPAIKKGILQTVKVVDELVKVMGRHKPENIVIEMARENQTTQKGQKNSRERMKRIEEGIKELGSQILKEHPVENTQLQNEKLYLYYLQNGRDMYVDQELDINRLSDYDVDAIVPQSFLKDDSIDNKVLTRSDKNRGKSDNVPSEEVVKKMKNYWRQLLNAKLITQRKFDNLTKAERGGLSELDKAGFIKRQLVETRQITKHVAQILDSRMNTKYDENDKLIREVKVITLKSKLVSDFRKDFQFYKVREINNYHHAHDAYLNAVVGTALIKKYPKLESEFVYGDYKVYDVRKMIAKSEQEIGKATAKYFFYSNIMNFFKTEITLANGEIRKRPLIETNGETGEIVWDKGRDFATVRKVLSMPQVNIVKKTEVQTGGFSKESILPKRNSDKLIARKKDWDPKKYGGFDSPTVAYSVLVVAKVEKGKSKKLKSVKELLGITIMERSSFEKNPIDFLEAKGYKEVKKDLIIKLPKYSLFELENGRKRMLASAGELQKGNELALPSKYVNFLYLASHYEKLKGSPEDNEQKQLFVEQHKHYLDEIIEQISEFSKRVILADANLDKVLSAYNKHRDKPIREQAENIIHLFTLTNLGAPAAFKYFDTTIDRKRYTSTKEVLDATLIHQSITGLYETRIDLSQLGGDSGGSSGGSSGGSSGGSSGGSSGGSSGGSSGGSTLNIEDEYRLHETSKEPDVSLGSTWLSDFPQAWAETGGMGLAVRQAPLIIPLKATSTPVSIKQYPMSQEARLGIKPHIQRLLDQGILVPCQSPWNTPLLPVKKPGTNDYRPVQDLREVNKRVEDIHPTVPNPYNLLSGLPPSHQWYTVLDLKDAFFCLRLHPTSQPLFAFEWRDPEMGISGQLTWTRLPQGFKNSPTLFNEALHRDLADFRIQHPDLILLQYVDDLLLAATSELDCQQGTRALLQTLGNLGYRASAKKAQICQKQVKYLGYLLKEGQRWLTEARKETVMGQPTPKTPRQLREFLGKAGFCRLFIPGFAEMAAPLYPLTKPGTLFNWGPDQQKAYQEIKQALLTAPALGLPDLTKPFELFVDEKQGYAKGVLTQKLGPWRRPVAYLSKKLDPVAAGWPPCLRMVAAIAVLTKDAGKLTMGQPLVILAPHAVEALVKQPPDRWLSNARMTHYQALLLDTDRVQFGPVVALNPATLLPLPEEGLQHNCLDILAEAHGSGGSKRTADGSEFEPKKKRKV

SEQ ID NO: 86 - protein, 1903 aa, synthetic construct
  REGION 1..1903: note = Description of Artificial Sequence: Synthetic polypeptide
DKKYSIGLDIGTNSVGWAVITDEYKVPSKKFKVLGNTDRHSIKKNLIGALLFDSGETAEATRLKRTARRRYTRRKNRICYLQEIFSNEMAKVDDSFFHRLEESFLVEEDKKHERHPIFGNIVDEVAYHEKYPTIYHLRKKLVDSTDKADLRLIYLALAHMIKFRGHFLIEGDLNPDNSDVDKLFIQLVQTYNQLFEENPINASGVDAKAILSARLSKSRRLENLIAQLPGEKKNGLFGNLIALSLGLTPNFKSNFDLAEDAKLQLSKDTYDDDLDNLLAQIGDQYADLFLAAKNLSDAILLSDILRVNTEITKAPLSASMIKRYDEHHQDLTLLKALVRQQLPEKYKEIFFDQSKNGYAGYIDGGASQEEFYKFIKPILEKMDGTEELLVKLNREDLLRKQRTFDNGSIPHQIHLGELHAILRRQEDFYPFLKDNREKIEKILTFRIPYYVGPLARGNSRFAWMTRKSEETITPWNFEEVVDKGASAQSFIERMTNFDKNLPNEKVLPKHSLLYEYFTVYNELTKVKYVTEGMRKPAFLSGEQKKAIVDLLFKTNRKVTVKQLKEDYFKKIECFDSVEISGVEDRFNASLGTYHDLLKIIKDKDFLDNEENEDILEDIVLTLTLFEDREMIEERLKTYAHLFDDKVMKQLKRRRYTGWGRLSRKLINGIRDKQSGKTILDFLKSDGFANRNFMQLIHDDSLTFKEDIQKAQVSGQGDSLHEHIANLAGSPAIKKGILQTVKVVDELVKVMGRHKPENIVIEMARENQTTQKGQKNSRERMKRIEEGIKELGSQILKEHPVENTQLQNEKLYLYYLQNGRDMYVDQELDINRLSDYDVDAIVPQSFLKDDSIDNKVLTRSDKNRGKSDNVPSEEVVKKMKNYWRQLLNAKLITQRKFDNLTKAERGGLSELDKAGFIKRQLVETRQITKHVAQILDSRMNTKYDENDKLIREVKVITLKSKLVSDFRKDFQFYKVREINNYHHAHDAYLNAVVGTALIKKYPKLESEFVYGDYKVYDVRKMIAKSEQEIGKATAKYFFYSNIMNFFKTEITLANGEIRKRPLIETNGETGEIVWDKGRDFATVRKVLSMPQVNIVKKTEVQTGGFSKESILPKRNSDKLIARKKDWDPKKYGGFDSPTVAYSVLVVAKVEKGKSKKLKSVKELLGITIMERSSFEKNPIDFLEAKGYKEVKKDLIIKLPKYSLFELENGRKRMLASAGELQKGNELALPSKYVNFLYLASHYEKLKGSPEDNEQKQLFVEQHKHYLDEIIEQISEFSKRVILADANLDKVLSAYNKHRDKPIREQAENIIHLFTLTNLGAPAAFKYFDTTIDRKRYTSTKEVLDATLIHQSITGLYETRIDLSQLGGDSGGSSGGSSGGSSGGSSGGSSGGSSGGSSGGSTLNIEDEYRLHETSKEPDVSLGSTWLSDFPQAWAETGGMGLAVRQAPLIIPLKATSTPVSIKQYPMSQEARLGIKPHIQRLLDQGILVPCQSPWNTPLLPVKKPGTNDYRPVQDLREVNKRVEDIHPTVPNPYNLLSGLPPSHQWYTVLDLKDAFFCLRLHPTSQPLFAFEWRDPEMGISGQLTWTRLPQGFKNSPTLFNEALHRDLADFRIQHPDLILLQYVDDLLLAATSELDCQQGTRALLQTLGNLGYRASAKKAQICQKQVKYLGYLLKEGQRWLTEARKETVMGQPTPKTPRQLREFLGKAGFCRLFIPGFAEMAAPLYPLTKPGTLFNWGPDQQKAYQEIKQALLTAPALGLPDLTKPFELFVDEKQGYAKGVLTQKLGPWRRPVAYLSKKLDPVAAGWPPCLRMVAAIAVLTKDAGKLTMGQPLVILAPHAVEALVKQPPDRWLSNARMTHYQALLLDTDRVQFGPVVALNPATLLPLPEEGLQHNCLDILAEAHG

SEQ ID NO: 87 - DNA, 5829 bp, synthetic construct
  misc_feature 1..5829: note = Description of Artificial Sequence: Synthetic polynucleotide
  source 1..5829: mol_type = other DNA
atgaaacggacagccgacggaagcgagttcgagtcaccaaagaagaagcggaaagtcgacaagaagtacagcatcggcctggacatcggcaccaactctgtgggctgggccgtgatcaccgacgagtacaaggtgcccagcaagaaattcaaggtgctgggcaacaccgaccggcacagcatcaagaagaacctgatcggagccctgctgttcgacagcggcgaaacagccgaggccacccggctgaagagaaccgccagaagaagatacaccagacggaagaaccggatctgctatctgcaagagatcttcagcaacgagatggccaaggtggacgacagcttcttccacagactggaagagtccttcctggtggaagaggataagaagcacgagcggcaccccatcttcggcaacatcgtggacgaggtggcctaccacgagaagtaccccaccatctaccacctgagaaagaaactggtggacagcaccgacaaggccgacctgcggctgatctatctggccctggcccacatgatcaagttccggggccacttcctgatcgagggcgacctgaaccccgacaacagcgacgtggacaagctgttcatccagctggtgcagacctacaaccagctgttcgaggaaaaccccatcaacgccagcggcgtggacgccaaggccatcctgtctgccagactgagcaagagcagacggctggaaaatctgatcgcccagctgcccggcgagaagaagaatggcctgttcggaaacctgattgccctgagcctgggcctgacccccaacttcaagagcaacttcgacctggccgaggatgccaaactgcagctgagcaaggacacctacgacgacgacctggacaacctgctggcccagatcggcgaccagtacgccgacctgtttctggccgccaagaacctgtccgacgccatcctgctgagcgacatcctgagagtgaacaccgagatcaccaaggcccccctgagcgcctctatgatcaagagatacgacgagcaccaccaggacctgaccctgctgaaagctctcgtgcggcagcagctgcctgagaagtacaaagagattttcttcgaccagagcaagaacggctacgccggctacattgacggcggagccagccaggaagagttctacaagttcatcaagcccatcctggaaaagatggacggcaccgaggaactgctcgtgaagctgaacagagaggacctgctgcggaagcagcggaccttcgacaacggcagcatcccccaccagatccacctgggagagctgcacgccattctgcggcggcaggaagatttttacccattcctgaaggacaaccgggaaaagatcgagaagatcctgaccttccgcatcccctactacgtgggccctctggccaggggaaacagcagattcgcctggatgaccagaaagagcgaggaaaccatcaccccctggaacttcgaggaagtggtggacaagggcgcttccgcccagagcttcatcgagcggatgaccaacttcgataagaacctgcccaacgagaaggtgctgcccaagcacagcctgctgtacgagtacttcaccgtgtataacgagctgaccaaagtgaaatacgtgaccgagggaatgagaaagcccgccttcctgagcggcgagcagaaaaaggccatcgtggacctgctgttcaagaccaaccggaaagtgaccgtgaagcagctgaaagaggactacttcaagaaaatcgagtgcttcgactccgtggaaatctccggcgtggaagatcggttcaacgcctccctgggcacataccacgatctgctgaaaattatcaaggacaaggacttcctggacaatgaggaaaacgaggacattctggaagatatcgtgctgaccctgacactgtttgaggacagagagatgatcgaggaacggctgaaaacctatgcccacctgttcgacgacaaagtgatgaagcagctgaagcggcggagatacaccggctggggcaggctgagccggaagctgatcaacggcatccgggacaagcagtccggcaagacaatcctggatttcctgaagtccgacggcttcgccaacagaaacttcatgcagctgatccacgacgacagcctgacctttaaagaggacatccagaaagcccaggtgtccggccagggcgatagcctgcacgagcacattgccaatctggccggcagccccgccattaagaagggcatcctgcagacagtgaaggtggtggacgagctcgtgaaagtgatgggccggcacaagcccgagaacatcgtgatcgaaatggccagagagaaccagaccacccagaagggacagaagaacagccgcgagagaatgaagcggatcgaagagggcatcaaagagctgggcagccagatcctgaaagaacaccccgtggaaaacacccagctgcagaacgagaagctgtacctgtactacctgcagaatgggcgggatatgtacgtggaccaggaactggacatcaaccggctgtccgactacgatgtggacgctatcgtgcctcagagctttctgaaggacgactccatcgacaacaaggtgctgaccagaagcgacaagaaccggggcaagagcgacaacgtgccctccgaagaggtcgtgaagaagatgaagaactactggcggcagctgctgaacgccaagctgattacccagagaaagttcgacaatctgaccaaggccgagagaggcggcctgagcgaactggataaggccggcttcatcaagagacagctggtggaaacccggcagatcacaaagcacgtggcacagatcctggactcccggatgaacactaagtacgacgagaatgacaagctgatccgggaagtgaaagtgatcaccctgaagtccaagctggtgtccgatttccggaaggatttccagttttacaaagtgcgcgagatcaacaactaccaccacgcccacgacgcctacctgaacgccgtcgtgggaaccgccctgatcaaaaagtaccctaagctggaaagcgagttcgtgtacggcgactacaaggtgtacgacgtgcggaagatgatcgccaagagcgagcaggaaatcggcaaggctaccgccaagtacttcttctacagcaacatcatgaactttttcaagaccgagattaccctggccaacggcgagatccggaagcggcctctgatcgagacaaacggcgaaaccggggagatcgtgtgggataagggccgggattttgccaccgtgcggaaagtgctgagcatgccccaagtgaatatcgtgaaaaagaccgaggtgcagacaggcggcttcagcaaagagtctatcctgcccaagaggaacagcgataagctgatcgccagaaagaaggactgggaccctaagaagtacggcggcttcgacagccccaccgtggcctattctgtgctggtggtggccaaagtggaaaagggcaagtccaagaaactgaagagtgtgaaagagctgctggggatcaccatcatggaaagaagcagcttcgagaagaatcccatcgactttctggaagccaagggctacaaagaagtgaaaaaggacctgatcatcaagctgcctaagtactccctgttcgagctggaaaacggccggaagagaatgctggcctctgccggcgaactgcagaagggaaacgaactggccctgccctccaaatatgtgaacttcctgtacctggccagccactatgagaagctgaagggctcccccgaggataatgagcagaaacagctgtttgtggaacagcacaagcactacctggacgagatcatcgagcagatcagcgagttctccaagagagtgatcctggccgacgctaatctggacaaagtgctgtccgcctacaacaagcaccgggataagcccatcagagagcaggccgagaatatcatccacctgtttaccctgaccaatctgggagcccctgccgccttcaagtactttgacaccaccatcgaccggaagaggtacactagcaccaaagaggtgctggacgccaccctgatccaccagagcatcaccggcctgtacgagacacggatcgacctgtctcagctgggaggtgactccggcggctcctccggcggaagcagcggcggcagcagcggcggaagcagcggcggcagcagcggcggaagctctggcggatctagcggcggctctaccctgaacatcgaggacgagtacaggctgcacgagaccagcaaggagcccgacgtgagcctgggcagcacctggctgagcgatttccctcaggcttgggccgagaccggcggcatgggcctggccgtgcggcaggcccccctgattatccccctgaaggccaccagcacccccgtgagcatcaagcagtacccaatgtcccaggaggccaggctgggcatcaagcctcacatccagaggctgctggaccagggcatcctggtgccatgccagtccccctggaacacccctctgctgcccgtgaagaagcctggcaccaacgactaccggcccgtgcaggacctgagagaagtgaacaagcgggtggaggacatccacccaaccgtgcccaacccttacaacctgctgtccggcctgccccccagccaccagtggtacaccgtgctggacctgaaggacgccttcttctgcctgagactgcaccccacctctcagcccctgttcgccttcgagtggcgcgaccccgagatgggcatcagcggccagctgacctggaccagactgccacagggctttaagaatagcccaaccctgtttaacgaggccctgcacagggacctggccgacttcaggatccagcaccccgacctgattctgctgcagtacgtggacgacctgctgctggccgctaccagcgagctggactgccagcagggcaccagagccctgctgcagaccctgggcaacctgggctacagagccagcgccaagaaggcccagatctgtcagaagcaggtgaagtatctgggctacctgctgaaggaaggccagagatggctgaccgaggccagaaaggagactgtgatgggccagcccacccccaagacccccaggcagctgcgggagttcctgggcaaggccggcttttgcagactgtttatccctggcttcgccgagatggccgccccactgtaccctctgaccaagcctggcaccctgtttaactggggccccgaccagcagaaggcctaccaggagatcaagcaggccctgctgaccgcccccgccctgggcctgcccgacctgaccaagcctttcgagctgttcgtggacgagaagcagggatacgccaaaggcgtgctgacccagaagctgggcccctggcggaggcccgtggcctacctgagcaaaaaactggaccctgtggccgccggctggcccccatgcctgcggatggtggccgccatcgctgtgctgaccaaggacgccggcaagctgaccatgggccagcccctggtgatcctggcccctcacgccgtggaggctctggtgaagcagcctccagacaggtggctgtccaacgccaggatgacccactaccaggccctgctgctggacaccgaccgggtgcagttcggccctgtggtggccctgaaccccgccaccctgctgcctctgccagaggagggcctgcagcacaactgcctggacatcctggccgaggcccacggcagcggcggctccaaacgcaccgccgacgggagcgagttcgagcccaagaagaagaggaaagtc

SEQ ID NO: 88 - RNA, 5829 nt, synthetic construct
  misc_feature 1..5829: note = Description of Artificial Sequence: Synthetic polynucleotide
  source 1..5829: mol_type = other RNA
atgaaacggacagccgacggaagcgagttcgagtcaccaaagaagaagcggaaagtcgacaagaagtacagcatcggcctggacatcggcaccaactctgtgggctgggccgtgatcaccgacgagtacaaggtgcccagcaagaaattcaaggtgctgggcaacaccgaccggcacagcatcaagaagaacctgatcggagccctgctgttcgacagcggcgaaacagccgaggccacccggctgaagagaaccgccagaagaagatacaccagacggaagaaccggatctgctatctgcaagagatcttcagcaacgagatggccaaggtggacgacagcttcttccacagactggaagagtccttcctggtggaagaggataagaagcacgagcggcaccccatcttcggcaacatcgtggacgaggtggcctaccacgagaagtaccccaccatctaccacctgagaaagaaactggtggacagcaccgacaaggccgacctgcggctgatctatctggccctggcccacatgatcaagttccggggccacttcctgatcgagggcgacctgaaccccgacaacagcgacgtggacaagctgttcatccagctggtgcagacctacaaccagctgttcgaggaaaaccccatcaacgccagcggcgtggacgccaaggccatcctgtctgccagactgagcaagagcagacggctggaaaatctgatcgcccagctgcccggcgagaagaagaatggcctgttcggaaacctgattgccctgagcctgggcctgacccccaacttcaagagcaacttcgacctggccgaggatgccaaactgcagctgagcaaggacacctacgacgacgacctggacaacctgctggcccagatcggcgaccagtacgccgacctgtttctggccgccaagaacctgtccgacgccatcctgctgagcgacatcctgagagtgaacaccgagatcaccaaggcccccctgagcgcctctatgatcaagagatacgacgagcaccaccaggacctgaccctgctgaaagctctcgtgcggcagcagctgcctgagaagtacaaagagattttcttcgaccagagcaagaacggctacgccggctacattgacggcggagccagccaggaagagttctacaagttcatcaagcccatcctggaaaagatggacggcaccgaggaactgctcgtgaagctgaacagagaggacctgctgcggaagcagcggaccttcgacaacggcagcatcccccaccagatccacctgggagagctgcacgccattctgcggcggcaggaagatttttacccattcctgaaggacaaccgggaaaagatcgagaagatcctgaccttccgcatcccctactacgtgggccctctggccaggggaaacagcagattcgcctggatgaccagaaagagcgaggaaaccatcaccccctggaacttcgaggaagtggtggacaagggcgcttccgcccagagcttcatcgagcggatgaccaacttcgataagaacctgcccaacgagaaggtgctgcccaagcacagcctgctgtacgagtacttcaccgtgtataacgagctgaccaaagtgaaatacgtgaccgagggaatgagaaagcccgccttcctgagcggcgagcagaaaaaggccatcgtggacctgctgttcaagaccaaccggaaagtgaccgtgaagcagctgaaagaggactacttcaagaaaatcgagtgcttcgactccgtggaaatctccggcgtggaagatcggttcaacgcctccctgggcacataccacgatctgctgaaaattatcaaggacaaggacttcctggacaatgaggaaaacgaggacattctggaagatatcgtgctgaccctgacactgtttgaggacagagagatgatcgaggaacggctgaaaacctatgcccacctgttcgacgacaaagtgatgaagcagctgaagcggcggagatacaccggctggggcaggctgagccggaagctgatcaacggcatccgggacaagcagtccggcaagacaatcctggatttcctgaagtccgacggcttcgccaacagaaacttcatgcagctgatccacgacgacagcctgacctttaaagaggacatccagaaagcccaggtgtccggccagggcgatagcctgcacgagcacattgccaatctggccggcagccccgccattaagaagggcatcctgcagacagtgaaggtggtggacgagctcgtgaaagtgatgggccggcacaagcccgagaacatcgtgatcgaaatggccagagagaaccagaccacccagaagggacagaagaacagccgcgagagaatgaagcggatcgaagagggcatcaaagagctgggcagccagatcctgaaagaacaccccgtggaaaacacccagctgcagaacgagaagctgtacctgtactacctgcagaatgggcgggatatgtacgtggaccaggaactggacatcaaccggctgtccgactacgatgtggacgctatcgtgcctcagagctttctgaaggacgactccatcgacaacaaggtgctgaccagaagcgacaagaaccggggcaagagcgacaacgtgccctccgaagaggtcgtgaagaagatgaagaactactggcggcagctgctgaacgccaagctgattacccagagaaagttcgacaatctgaccaaggccgagagaggcggcctgagcgaactggataaggccggcttcatcaagagacagctggtggaaacccggcagatcacaaagcacgtggcacagatcctggactcccggatgaacactaagtacgacgagaatgacaagctgatccgggaagtgaaagtgatcaccctgaagtccaagctggtgtccgatttccggaaggatttccagttttacaaagtgcgcgagatcaacaactaccaccacgcccacgacgcctacctgaacgccgtcgtgggaaccgccctgatcaaaaagtaccctaagctggaaagcgagttcgtgtacggcgactacaaggtgtacgacgtgcggaagatgatcgccaagagcgagcaggaaatcggcaaggctaccgccaagtacttcttctacagcaacatcatgaactttttcaagaccgagattaccctggccaacggcgagatccggaagcggcctctgatcgagacaaacggcgaaaccggggagatcgtgtgggataagggccgggattttgccaccgtgcggaaagtgctgagcatgccccaagtgaatatcgtgaaaaagaccgaggtgcagacaggcggcttcagcaaagagtctatcctgcccaagaggaacagcgataagctgatcgccagaaagaaggactgggaccctaagaagtacggcggcttcgacagccccaccgtggcctattctgtgctggtggtggccaaagtggaaaagggcaagtccaagaaactgaagagtgtgaaagagctgctggggatcaccatcatggaaagaagcagcttcgagaagaatcccatcgactttctggaagccaagggctacaaagaagtgaaaaaggacctgatcatcaagctgcctaagtactccctgttcgagctggaaaacggccggaagagaatgctggcctctgccggcgaactgcagaagggaaacgaactggccctgccctccaaatatgtgaacttcctgtacctggccagccactatgagaagctgaagggctcccccgaggataatgagcagaaacagctgtttgtggaacagcacaagcactacctggacgagatcatcgagcagatcagcgagttctccaagagagtgatcctggccgacgctaatctggacaaagtgctgtccgcctacaacaagcaccgggataagcccatcagagagcaggccgagaatatcatccacctgtttaccctgaccaatctgggagcccctgccgccttcaagtactttgacaccaccatcgaccggaagaggtacactagcaccaaagaggtgctggacgccaccctgatccaccagagcatcaccggcctgtacgagacacggatcgacctgtctcagctgggaggtgactccggcggctcctccggcggaagcagcggcggcagcagcggcggaagcagcggcggcagcagcggcggaagctctggcggatctagcggcggctctaccctgaacatcgaggacgagtacaggctgcacgagaccagcaaggagcccgacgtgagcctgggcagcacctggctgagcgatttccctcaggcttgggccgagaccggcggcatgggcctggccgtgcggcaggcccccctgattatccccctgaaggccaccagcacccccgtgagcatcaagcagtacccaatgtcccaggaggccaggctgggcatcaagcctcacatccagaggctgctggaccagggcatcctggtgccatgccagtccccctggaacacccctctgctgcccgtgaagaagcctggcaccaacgactaccggcccgtgcaggacctgagagaagtgaacaagcgggtggaggacatccacccaaccgtgcccaacccttacaacctgctgtccggcctgccccccagccaccagtggtacaccgtgctggacctgaaggacgccttcttctgcctgagactgcaccccacctctcagcccctgttcgccttcgagtggcgcgaccccgagatgggcatcagcggccagctgacctggaccagactgccacagggctttaagaatagcccaaccctgtttaacgaggccctgcacagggacctggccgacttcaggatccagcaccccgacctgattctgctgcagtacgtggacgacctgctgctggccgctaccagcgagctggactgccagcagggcaccagagccctgctgcagaccctgggcaacctgggctacagagccagcgccaagaaggcccagatctgtcagaagcaggtgaagtatctgggctacctgctgaaggaaggccagagatggctgaccgaggccagaaaggagactgtgatgggccagcccacccccaagacccccaggcagctgcgggagttcctgggcaaggccggcttttgcagactgtttatccctggcttcgccgagatggccgccccactgtaccctctgaccaagcctggcaccctgtttaactggggccccgaccagcagaaggcctaccaggagatcaagcaggccctgctgaccgcccccgccctgggcctgcccgacctgaccaagcctttcgagctgttcgtggacgagaagcagggatacgccaaaggcgtgctgacccagaagctgggcccctggcggaggcccgtggcctacctgagcaaaaaactggaccctgtggccgccggctggcccccatgcctgcggatggtggccgccatcgctgtgctgaccaaggacgccggcaagctgaccatgggccagcccctggtgatcctggcccctcacgccgtggaggctctggtgaagcagcctccagacaggtggctgtccaacgccaggatgacccactaccaggccctgctgctggacaccgaccgggtgcagttcggccctgtggtggccctgaaccccgccaccctgctgcctctgccagaggagggcctgcagcacaactgcctggacatcctggccgaggcccacggcagcggcggctccaaacgcaccgccgacgggagcgagttcgagcccaagaagaagaggaaagtc

SEQ ID NO: 89 - DNA, 5709 bp, synthetic construct
  misc_feature 1..5709: note = Description of Artificial Sequence: Synthetic polynucleotide
  source 1..5709: mol_type = other DNA
gacaagaagtacagcatcggcctggacatcggcaccaactctgtgggctgggccgtgatcaccgacgagtacaaggtgcccagcaagaaattcaaggtgctgggcaacaccgaccggcacagcatcaagaagaacctgatcggagccctgctgttcgacagcggcgaaacagccgaggccacccggctgaagagaaccgccagaagaagatacaccagacggaagaaccggatctgctatctgcaagagatcttcagcaacgagatggccaaggtggacgacagcttcttccacagactggaagagtccttcctggtggaagaggataagaagcacgagcggcaccccatcttcggcaacatcgtggacgaggtggcctaccacgagaagtaccccaccatctaccacctgagaaagaaactggtggacagcaccgacaaggccgacctgcggctgatctatctggccctggcccacatgatcaagttccggggccacttcctgatcgagggcgacctgaaccccgacaacagcgacgtggacaagctgttcatccagctggtgcagacctacaaccagctgttcgaggaaaaccccatcaacgccagcggcgtggacgccaaggccatcctgtctgccagactgagcaagagcagacggctggaaaatctgatcgcccagctgcccggcgagaagaagaatggcctgttcggaaacctgattgccctgagcctgggcctgacccccaacttcaagagcaacttcgacctggccgaggatgccaaactgcagctgagcaaggacacctacgacgacgacctggacaacctgctggcccagatcggcgaccagtacgccgacctgtttctggccgccaagaacctgtccgacgccatcctgctgagcgacatcctgagagtgaacaccgagatcaccaaggcccccctgagcgcctctatgatcaagagatacgacgagcaccaccaggacctgaccctgctgaaagctctcgtgcggcagcagctgcctgagaagtacaaagagattttcttcgaccagagcaagaacggctacgccggctacattgacggcggagccagccaggaagagttctacaagttcatcaagcccatcctggaaaagatggacggcaccgaggaactgctcgtgaagctgaacagagaggacctgctgcggaagcagcggaccttcgacaacggcagcatcccccaccagatccacctgggagagctgcacgccattctgcggcggcaggaagatttttacccattcctgaaggacaaccgggaaaagatcgagaagatcctgaccttccgcatcccctactacgtgggccctctggccaggggaaacagcagattcgcctggatgaccagaaagagcgaggaaaccatcaccccctggaacttcgaggaagtggtggacaagggcgcttccgcccagagcttcatcgagcggatgaccaacttcgataagaacctgcccaacgagaaggtgctgcccaagcacagcctgctgtacgagtacttcaccgtgtataacgagctgaccaaagtgaaatacgtgaccgagggaatgagaaagcccgccttcctgagcggcgagcagaaaaaggccatcgtggacctgctgttcaagaccaaccggaaagtgaccgtgaagcagctgaaagaggactacttcaagaaaatcgagtgcttcgactccgtggaaatctccggcgtggaagatcggttcaacgcctccctgggcacataccacgatctgctgaaaattatcaaggacaaggacttcctggacaatgaggaaaacgaggacattctggaagatatcgtgctgaccctgacactgtttgaggacagagagatgatcgaggaacggctgaaaacctatgcccacctgttcgacgacaaagtgatgaagcagctgaagcggcggagatacaccggctggggcaggctgagccggaagctgatcaacggcatccgggacaagcagtccggcaagacaatcctggatttcctgaagtccgacggcttcgccaacagaaacttcatgcagctgatccacgacgacagcctgacctttaaagaggacatccagaaagcccaggtgtccggccagggcgatagcctgcacgagcacattgccaatctggccggcagccccgccattaagaagggcatcctgcagacagtgaaggtggtggacgagctcgtgaaagtgatgggccggcacaagcccgagaacatcgtgatcgaaatggccagagagaaccagaccacccagaagggacagaagaacagccgcgagagaatgaagcggatcgaagagggcatcaaagagctgggcagccagatcctgaaagaacaccccgtggaaaacacccagctgcagaacgagaagctgtacctgtactacctgcagaatgggcgggatatgtacgtggaccaggaactggacatcaaccggctgtccgactacgatgtggacgctatcgtgcctcagagctttctgaaggacgactccatcgacaacaaggtgctgaccagaagcgacaagaaccggggcaagagcgacaacgtgccctccgaagaggtcgtgaagaagatgaagaactactggcggcagctgctgaacgccaagctgattacccagagaaagttcgacaatctgaccaaggccgagagaggcggcctgagcgaactggataaggccggcttcatcaagagacagctggtggaaacccggcagatcacaaagcacgtggcacagatcctggactcccggatgaacactaagtacgacgagaatgacaagctgatccgggaagtgaaagtgatcaccctgaagtccaagctggtgtccgatttccggaaggatttccagttttacaaagtgcgcgagatcaacaactaccaccacgcccacgacgcctacctgaacgccgtcgtgggaaccgccctgatcaaaaagtaccctaagctggaaagcgagttcgtgtacggcgactacaaggtgtacgacgtgcggaagatgatcgccaagagcgagcaggaaatcggcaaggctaccgccaagtacttcttctacagcaacatcatgaactttttcaagaccgagattaccctggccaacggcgagatccggaagcggcctctgatcgagacaaacggcgaaaccggggagatcgtgtgggataagggccgggattttgccaccgtgcggaaagtgctgagcatgccccaagtgaatatcgtgaaaaagaccgaggtgcagacaggcggcttcagcaaagagtctatcctgcccaagaggaacagcgataagctgatcgccagaaagaaggactgggaccctaagaagtacggcggcttcgacagccccaccgtggcctattctgtgctggtggtggccaaagtggaaaagggcaagtccaagaaactgaagagtgtgaaagagctgctggggatcaccatcatggaaagaagcagcttcgagaagaatcccatcgactttctggaagccaagggctacaaagaagtgaaaaaggacctgatcatcaagctgcctaagtactccctgttcgagctggaaaacggccggaagagaatgctggcctctgccggcgaactgcagaagggaaacgaactggccctgccctccaaatatgtgaacttcctgtacctggccagccactatgagaagctgaagggctcccccgaggataatgagcagaaacagctgtttgtggaacagcacaagcactacctggacgagatcatcgagcagatcagcgagttctccaagagagtgatcctggccgacgctaatctggacaaagtgctgtccgcctacaacaagcaccgggataagcccatcagagagcaggccgagaatatcatccacctgtttaccctgaccaatctgggagcccctgccgccttcaagtactttgacaccaccatcgaccggaagaggtacactagcaccaaagaggtgctggacgccaccctgatccaccagagcatcaccggcctgtacgagacacggatcgacctgtctcagctgggaggtgactccggcggctcctccggcggaagcagcggcggcagcagcggcggaagcagcggcggcagcagcggcggaagctctggcggatctagcggcggctctaccctgaacatcgaggacgagtacaggctgcacgagaccagcaaggagcccgacgtgagcctgggcagcacctggctgagcgatttccctcaggcttgggccgagaccggcggcatgggcctggccgtgcggcaggcccccctgattatccccctgaaggccaccagcacccccgtgagcatcaagcagtacccaatgtcccaggaggccaggctgggcatcaagcctcacatccagaggctgctggaccagggcatcctggtgccatgccagtccccctggaacacccctctgctgcccgtgaagaagcctggcaccaacgactaccggcccgtgcaggacctgagagaagtgaacaagcgggtggaggacatccacccaaccgtgcccaacccttacaacctgctgtccggcctgccccccagccaccagtggtacaccgtgctggacctgaaggacgccttcttctgcctgagactgcaccccacctctcagcccctgttcgccttcgagtggcgcgaccccgagatgggcatcagcggccagctgacctggaccagactgccacagggctttaagaatagcccaaccctgtttaacgaggccctgcacagggacctggccgacttcaggatccagcaccccgacctgattctgctgcagtacgtggacgacctgctgctggccgctaccagcgagctggactgccagcagggcaccagagccctgctgcagaccctgggcaacctgggctacagagccagcgccaagaaggcccagatctgtcagaagcaggtgaagtatctgggctacctgctgaaggaaggccagagatggctgaccgaggccagaaaggagactgtgatgggccagcccacccccaagacccccaggcagctgcgggagttcctgggcaaggccggcttttgcagactgtttatccctggcttcgccgagatggccgccccactgtaccctctgaccaagcctggcaccctgtttaactggggccccgaccagcagaaggcctaccaggagatcaagcaggccctgctgaccgcccccgccctgggcctgcccgacctgaccaagcctttcgagctgttcgtggacgagaagcagggatacgccaaaggcgtgctgacccagaagctgggcccctggcggaggcccgtggcctacctgagcaaaaaactggaccctgtggccgccggctggcccccatgcctgcggatggtggccgccatcgctgtgctgaccaaggacgccggcaagctgaccatgggccagcccctggtgatcctggcccctcacgccgtggaggctctggtgaagcagcctccagacaggtggctgtccaacgccaggatgacccactaccaggccctgctgctggacaccgaccgggtgcagttcggccctgtggtggccctgaaccccgccaccctgctgcctctgccagaggagggcctgcagcacaactgcctggacatcctggccgaggcccacggc

SEQ ID NO: 90 - RNA, 5709 nt, synthetic construct
  misc_feature 1..5709: note = Description of Artificial Sequence: Synthetic polynucleotide
  source 1..5709: mol_type = other RNA
gacaagaagtacagcatcggcctggacatcggcaccaactctgtgggctgggccgtgatcaccgacgagtacaaggtgcccagcaagaaattcaaggtgctgggcaacaccgaccggcacagcatcaagaagaacctgatcggagccctgctgttcgacagcggcgaaacagccgaggccacccggctgaagagaaccgccagaagaagatacaccagacggaagaaccggatctgctatctgcaagagatcttcagcaacgagatggccaaggtggacgacagcttcttccacagactggaagagtccttcctggtggaagaggataagaagcacgagcggcaccccatcttcggcaacatcgtggacgaggtggcctaccacgagaagtaccccaccatctaccacctgagaaagaaactggtggacagcaccgacaaggccgacctgcggctgatctatctggccctggcccacatgatcaagttccggggccacttcctgatcgagggcgacctgaaccccgacaacagcgacgtggacaagctgttcatccagctggtgcagacctacaaccagctgttcgaggaaaaccccatcaacgccagcggcgtggacgccaaggccatcctgtctgccagactgagcaagagcagacggctggaaaatctgatcgcccagctgcccggcgagaagaagaatggcctgttcggaaacctgattgccctgagcctgggcctgacccccaacttcaagagcaacttcgacctggccgaggatgccaaactgcagctgagcaaggacacctacgacgacgacctggacaacctgctggcccagatcggcgaccagtacgccgacctgtttctggccgccaagaacctgtccgacgccatcctgctgagcgacatcctgagagtgaacaccgagatcaccaaggcccccctgagcgcctctatgatcaagagatacgacgagcaccaccaggacctgaccctgctgaaagctctcgtgcggcagcagctgcctgagaagtacaaagagattttcttcgaccagagcaagaacggctacgccggctacattgacggcggagccagccaggaagagttctacaagttcatcaagcccatcctggaaaagatggacggcaccgaggaactgctcgtgaagctgaacagagaggacctgctgcggaagcagcggaccttcgacaacggcagcatcccccaccagatccacctgggagagctgcacgccattctgcggcggcaggaagatttttacccattcctgaaggacaaccgggaaaagatcgagaagatcctgaccttccgcatcccctactacgtgggccctctggccaggggaaacagcagattcgcctggatgaccagaaagagcgaggaaaccatcaccccctggaacttcgaggaagtggtggacaagggcgcttccgcccagagcttcatcgagcggatgaccaacttcgataagaacctgcccaacgagaaggtgctgcccaagcacagcctgctgtacgagtacttcaccgtgtataacgagctgaccaaagtgaaatacgtgaccgagggaatgagaaagcccgccttcctgagcggcgagcagaaaaaggccatcgtggacctgctgttcaagaccaaccggaaagtgaccgtgaagcagctgaaagaggactacttcaagaaaatcgagtgcttcgactccgtggaaatctccggcgtggaagatcggttcaacgcctccctgggcacataccacgatctgctgaaaattatcaaggacaaggacttcctggacaatgaggaaaacgaggacattctggaagatatcgtgctgaccctgacactgtttgaggacagagagatgatcgaggaacggctgaaaacctatgcccacctgttcgacgacaaagtgatgaagcagctgaagcggcggagatacaccggctggggcaggctgagccggaagctgatcaacggcatccgggacaagcagtccggcaagacaatcctggatttcctgaagtccgacggcttcgccaacagaaacttcatgcagctgatccacgacgacagcctgacctttaaagaggacatccagaaagcccaggtgtccggccagggcgatagcctgcacgagcacattgccaatctggccggcagccccgccattaagaagggcatcctgcagacagtgaaggtggtggacgagctcgtgaaagtgatgggccggcacaagcccgagaacatcgtgatcgaaatggccagagagaaccagaccacccagaagggacagaagaacagccgcgagagaatgaagcggatcgaagagggcatcaaagagctgggcagccagatcctgaaagaacaccccgtggaaaacacccagctgcagaacgagaagctgtacctgtactacctgcagaatgggcgggatatgtacgtggaccaggaactggacatcaaccggctgtccgactacgatgtggacgctatcgtgcctcagagctttctgaaggacgactccatcgacaacaaggtgctgaccagaagcgacaagaaccggggcaagagcgacaacgtgccctccgaagaggtcgtgaagaagatgaagaactactggcggcagctgctgaacgccaagctgattacccagagaaagttcgacaatctgaccaaggccgagagaggcggcctgagcgaactggataaggccggcttcatcaagagacagctggtggaaacccggcagatcacaaagcacgtggcacagatcctggactcccggatgaacactaagtacgacgagaatgacaagctgatccgggaagtgaaagtgatcaccctgaagtccaagctggtgtccgatttccggaaggatttccagttttacaaagtgcgcgagatcaacaactaccaccacgcccacgacgcctacctgaacgccgtcgtgggaaccgccctgatcaaaaagtaccctaagctggaaagcgagttcgtgtacggcgactacaaggtgtacgacgtgcggaagatgatcgccaagagcgagcaggaaatcggcaaggctaccgccaagtacttcttctacagcaacatcatgaactttttcaagaccgagattaccctggccaacggcgagatccggaagcggcctctgatcgagacaaacggcgaaaccggggagatcgtgtgggataagggccgggattttgccaccgtgcggaaagtgctgagcatgccccaagtgaatatcgtgaaaaagaccgaggtgcagacaggcggcttcagcaaagagtctatcctgcccaagaggaacagcgataagctgatcgccagaaagaaggactgggaccctaagaagtacggcggcttcgacagccccaccgtggcctattctgtgctggtggtggccaaagtggaaaagggcaagtccaagaaactgaagagtgtgaaagagctgctggggatcaccatcatggaaagaagcagcttcgagaagaatcccatcgactttctggaagccaagggctacaaagaagtgaaaaaggacctgatcatcaagctgcctaagtactccctgttcgagctggaaaacggccggaagagaatgctggcctctgccggcgaactgcagaagggaaacgaactggccctgccctccaaatatgtgaacttcctgtacctggccagccactatgagaagctgaagggctcccccgaggataatgagcagaaacagctgtttgtggaacagcacaagcactacctggacgagatcatcgagcagatcagcgagttctccaagagagtgatcctggccgacgctaatctggacaaagtgctgtccgcctacaacaagcaccgggataagcccatcagagagcaggccgagaatatcatccacctgtttaccctgaccaatctgggagcccctgccgccttcaagtactttgacaccaccatcgaccggaagaggtacactagcaccaaagaggtgctggacgccaccctgatccaccagagcatcaccggcctgtacgagacacggatcgacctgtctcagctgggaggtgactccggcggctcctccggcggaagcagcggcggcagcagcggcggaagcagcggcggcagcagcggcggaagctctggcggatctagcggcggctctaccctgaacatcgaggacgagtacaggctgcacgagaccagcaaggagcccgacgtgagcctgggcagcacctggctgagcgatttccctcaggcttgggccgagaccggcggcatgggcctggccgtgcggcaggcccccctgattatccccctgaaggccaccagcacccccgtgagcatcaagcagtacccaatgtcccaggaggccaggctgggcatcaagcctcacatccagaggctgctggaccagggcatcctggtgccatgccagtccccctggaacacccctctgctgcccgtgaagaagcctggcaccaacgactaccggcccgtgcaggacctgagagaagtgaacaagcgggtggaggacatccacccaaccgtgcccaacccttacaacctgctgtccggcctgccccccagccaccagtggtacaccgtgctggacctgaaggacgccttcttctgcctgagactgcaccccacctctcagcccctgttcgccttcgagtggcgcgaccccgagatgggcatcagcggccagctgacctggaccagactgccacagggctttaagaatagcccaaccctgtttaacgaggccctgcacagggacctggccgacttcaggatccagcaccccgacctgattctgctgcagtacgtggacgacctgctgctggccgctaccagcgagctggactgccagcagggcaccagagccctgctgcagaccctgggcaacctgggctacagagccagcgccaagaaggcccagatctgtcagaagcaggtgaagtatctgggctacctgctgaaggaaggccagagatggctgaccgaggccagaaaggagactgtgatgggccagcccacccccaagacccccaggcagctgcgggagttcctgggcaaggccggcttttgcagactgtttatccctggcttcgccgagatggccgccccactgtaccctctgaccaagcctggcaccctgtttaactggggccccgaccagcagaaggcctaccaggagatcaagcaggccctgctgaccgcccccgccctgggcctgcccgacctgaccaagcctttcgagctgttcgtggacgagaagcagggatacgccaaaggcgtgctgacccagaagctgggcccctggcggaggcccgtggcctacctgagcaaaaaactggaccctgtggccgccggctggcccccatgcctgcggatggtggccgccatcgctgtgctgaccaaggacgccggcaagctgaccatgggccagcccctggtgatcctggcccctcacgccgtggaggctctggtgaagcagcctccagacaggtggctgtccaacgccaggatgacccactaccaggccctgctgctggacaccgaccgggtgcagttcggccctgtggtggccctgaaccccgccaccctgctgcctctgccagaggagggcctgcagcacaactgcctggacatcctggccgaggcccacggc

SEQ ID NO: 91 - DNA, 1512 bp, synthetic construct
  misc_feature 1..1512: note = Description of Artificial Sequence: Synthetic polynucleotide
  source 1..1512: mol_type = other DNA
accctgaacatcgaggacgagtacaggctgcacgagaccagcaaggagcccgacgtgagcctgggcagcacctggctgagcgatttccctcaggcttgggccgagaccggcggcatgggcctggccgtgcggcaggcccccctgattatccccctgaaggccaccagcacccccgtgagcatcaagcagtacccaatgtcccaggaggccaggctgggcatcaagcctcacatccagaggctgctggaccagggcatcctggtgccatgccagtccccctggaacacccctctgctgcccgtgaagaagcctggcaccaacgactaccggcccgtgcaggacctgagagaagtgaacaagcgggtggaggacatccacccaaccgtgcccaacccttacaacctgctgtccggcctgccccccagccaccagtggtacaccgtgctggacctgaaggacgccttcttctgcctgagactgcaccccacctctcagcccctgttcgccttcgagtggcgcgaccccgagatgggcatcagcggccagctgacctggaccagactgccacagggctttaagaatagcccaaccctgtttaacgaggccctgcacagggacctggccgacttcaggatccagcaccccgacctgattctgctgcagtacgtggacgacctgctgctggccgctaccagcgagctggactgccagcagggcaccagagccctgctgcagaccctgggcaacctgggctacagagccagcgccaagaaggcccagatctgtcagaagcaggtgaagtatctgggctacctgctgaaggaaggccagagatggctgaccgaggccagaaaggagactgtgatgggccagcccacccccaagacccccaggcagctgcgggagttcctgggcaaggccggcttttgcagactgtttatccctggcttcgccgagatggccgccccactgtaccctctgaccaagcctggcaccctgtttaactggggccccgaccagcagaaggcctaccaggagatcaagcaggccctgctgaccgcccccgccctgggcctgcccgacctgaccaagcctttcgagctgttcgtggacgagaagcagggatacgccaaaggcgtgctgacccagaagctgggcccctggcggaggcccgtggcctacctgagcaaaaaactggaccctgtggccgccggctggcccccatgcctgcggatggtggccgccatcgctgtgctgaccaaggacgccggcaagctgaccatgggccagcccctggtgatcctggcccctcacgccgtggaggctctggtgaagcagcctccagacaggtggctgtccaacgccaggatgacccactaccaggccctgctgctggacaccgaccgggtgcagttcggccctgtggtggccctgaaccccgccaccctgctgcctctgccagaggagggcctgcagcacaactgcctggacatcctggccgaggcccacggc

SEQ ID NO: 92 - RNA, 1512 nt, synthetic construct
  misc_feature 1..1512: note = Description of Artificial Sequence: Synthetic polynucleotide
  source 1..1512: mol_type = other RNA
accctgaacatcgaggacgagtacaggctgcacgagaccagcaaggagcccgacgtgagcctgggcagcacctggctgagcgatttccctcaggcttgggccgagaccggcggcatgggcctggccgtgcggcaggcccccctgattatccccctgaaggccaccagcacccccgtgagcatcaagcagtacccaatgtcccaggaggccaggctgggcatcaagcctcacatccagaggctgctggaccagggcatcctggtgccatgccagtccccctggaacacccctctgctgcccgtgaagaagcctggcaccaacgactaccggcccgtgcaggacctgagagaagtgaacaagcgggtggaggacatccacccaaccgtgcccaacccttacaacctgctgtccggcctgccccccagccaccagtggtacaccgtgctggacctgaaggacgccttcttctgcctgagactgcaccccacctctcagcccctgttcgccttcgagtggcgcgaccccgagatgggcatcagcggccagctgacctggaccagactgccacagggctttaagaatagcccaaccctgtttaacgaggccctgcacagggacctggccgacttcaggatccagcaccccgacctgattctgctgcagtacgtggacgacctgctgctggccgctaccagcgagctggactgccagcagggcaccagagccctgctgcagaccctgggcaacctgggctacagagccagcgccaagaaggcccagatctgtcagaagcaggtgaagtatctgggctacctgctgaaggaaggccagagatggctgaccgaggccagaaaggagactgtgatgggccagcccacccccaagacccccaggcagctgcgggagttcctgggcaaggccggcttttgcagactgtttatccctggcttcgccgagatggccgccccactgtaccctctgaccaagcctggcaccctgtttaactggggccccgaccagcagaaggcctaccaggagatcaagcaggccctgctgaccgcccccgccctgggcctgcccgacctgaccaagcctttcgagctgttcgtggacgagaagcagggatacgccaaaggcgtgctgacccagaagctgggcccctggcggaggcccgtggcctacctgagcaaaaaactggaccctgtggccgccggctggcccccatgcctgcggatggtggccgccatcgctgtgctgaccaaggacgccggcaagctgaccatgggccagcccctggtgatcctggcccctcacgccgtggaggctctggtgaagcagcctccagacaggtggctgtccaacgccaggatgacccactaccaggccctgctgctggacaccgaccgggtgcagttcggccctgtggtggccctgaaccccgccaccctgctgcctctgccagaggagggcctgcagcacaactgcctggacatcctggccgaggcccacggc

SEQ ID NO: 93 - protein, 2135 aa, synthetic construct
  REGION 1..2135: note = Description of Artificial Sequence: Synthetic polypeptide
MPAAKRVKLDGGKRTADGSEFESPKKKRKVDKKYSIGLDIGTNSVGWAVITDEYKVPSKKFKVLGNTDRHSIKKNLIGALLFDSGETAEATRLKRTARRRYTRRKNRICYLQEIFSNEMAKVDDSFFHRLEESFLVEEDKKHERHPIFGNIVDEVAYHEKYPTIYHLRKKLVDSTDKADLRLIYLALAHMIKFRGHFLIEGDLNPDNSDVDKLFIQLVQTYNQLFEENPINASGVDAKAILSARLSKSRRLENLIAQLPGEKKNGLFGNLIALSLGLTPNFKSNFDLAEDAKLQLSKDTYDDDLDNLLAQIGDQYADLFLAAKNLSDAILLSDILRVNTEITKAPLSASMIKRYDEHHQDLTLLKALVRQQLPEKYKEIFFDQSKNGYAGYIDGGASQEEFYKFIKPILEKMDGTEELLVKLNREDLLRKQRTFDNGSIPHQIHLGELHAILRRQEDFYPFLKDNREKIEKILTFRIPYYVGPLARGNSRFAWMTRKSEETITPWNFEEVVDKGASAQSFIERMTNFDKNLPNEKVLPKHSLLYEYFTVYNELTKVKYVTEGMRKPAFLSGEQKKAIVDLLFKTNRKVTVKQLKEDYFKKIECFDSVEISGVEDRFNASLGTYHDLLKIIKDKDFLDNEENEDILEDIVLTLTLFEDREMIEERLKTYAHLFDDKVMKQLKRRRYTGWGRLSRKLINGIRDKQSGKTILDFLKSDGFANRNFMQLIHDDSLTFKEDIQKAQVSGQGDSLHEHIANLAGSPAIKKGILQTVKVVDELVKVMGRHKPENIVIEMARENQTTQKGQKNSRERMKRIEEGIKELGSQILKEHPVENTQLQNEKLYLYYLQNGRDMYVDQELDINRLSDYDVDAIVPQSFLKDDSIDNKVLTRSDKNRGKSDNVPSEEVVKKMKNYWRQLLNAKLITQRKFDNLTKAERGGLSELDKAGFIKRQLVETRQITKHVAQILDSRMNTKYDENDKLIREVKVITLKSKLVSDFRKDFQFYKVREINNYHHAHDAYLNAVVGTALIKKYPKLESEFVYGDYKVYDVRKMIAKSEQEIGKATAKYFFYSNIMNFFKTEITLANGEIRKRPLIETNGETGEIVWDKGRDFATVRKVLSMPQVNIVKKTEVQTGGFSKESILPKRNSDKLIARKKDWDPKKYGGFDSPTVAYSVLVVAKVEKGKSKKLKSVKELLGITIMERSSFEKNPIDFLEAKGYKEVKKDLIIKLPKYSLFELENGRKRMLASAGELQKGNELALPSKYVNFLYLASHYEKLKGSPEDNEQKQLFVEQHKHYLDEIIEQISEFSKRVILADANLDKVLSAYNKHRDKPIREQAENIIHLFTLTNLGAPAAFKYFDTTIDRKRYTSTKEVLDATLIHQSITGLYETRIDLSQLGGDSGGSSGGSSGGSSGGSSGGSSGGSSGGSSGGSTLNIEDEYRLHETSKEPDVSLGSTWLSDFPQAWAETGGMGLAVRQAPLIIPLKATSTPVSIKQYPMSQEARLGIKPHIQRLLDQGILVPCQSPWNTPLLPVKKPGTNDYRPVQDLREVNKRVEDIHPTVPNPYNLLSGLPPSHQWYTVLDLKDAFFCLRLHPTSQPLFAFEWRDPEMGISGQLTWTRLPQGFKNSPTLFNEALHRDLADFRIQHPDLILLQYVDDLLLAATSELDCQQGTRALLQTLGNLGYRASAKKAQICQKQVKYLGYLLKEGQRWLTEARKETVMGQPTPKTPRQLREFLGKAGFCRLFIPGFAEMAAPLYPLTKPGTLFNWGPDQQKAYQEIKQALLTAPALGLPDLTKPFELFVDEKQGYAKGVLTQKLGPWRRPVAYLSKKLDPVAAGWPPCLRMVAAIAVLTKDAGKLTMGQPLVILAPHAVEALVKQPPDRWLSNARMTHYQALLLDTDRVQFGPVVALNPATLLPLPEEGLQHNCLDILAEAHGTRPDLTDQPLPDADHTWYTDGSSLLQEGQRKAGAAVTTETEVIWAKALPAGTSAQRAELIALTQALKMAEGKKLNVYTDSRYAFATAHIHGEIYRRRGWLTSEGKEIKNKDEILALLKALFLPKRLSIIHCPGHQKGHSAEARGNRMADQAARKAAITETPDTSTLLIENSSPSKRTADSQHSTPPKTKRKVEFEPKKKRKV

SEQ ID NO: 94 - DNA, 6405 bp, synthetic construct
  misc_feature 1..6405: note = Description of Artificial Sequence: Synthetic polynucleotide
  source 1..6405: mol_type = other DNA
atgcccgcggccaagagagtgaagctggacggcggcaaacggacagccgacggaagcgagttcgagtcaccaaagaagaagcggaaagtcgacaagaagtacagcatcggcctggacatcggcaccaactctgtgggctgggccgtgatcaccgacgagtacaaggtgcccagcaagaaattcaaggtgctgggcaacaccgaccggcacagcatcaagaagaacctgatcggagccctgctgttcgacagcggcgaaacagccgaggccacccggctgaagagaaccgccagaagaagatacaccagacggaagaaccggatctgctatctgcaagagatcttcagcaacgagatggccaaggtggacgacagcttcttccacagactggaagagtccttcctggtggaagaggataagaagcacgagcggcaccccatcttcggcaacatcgtggacgaggtggcctaccacgagaagtaccccaccatctaccacctgagaaagaaactggtggacagcaccgacaaggccgacctgcggctgatctatctggccctggcccacatgatcaagttccggggccacttcctgatcgagggcgacctgaaccccgacaacagcgacgtggacaagctgttcatccagctggtgcagacctacaaccagctgttcgaggaaaaccccatcaacgccagcggcgtggacgccaaggccatcctgtctgccagactgagcaagagcagacggctggaaaatctgatcgcccagctgcccggcgagaagaagaatggcctgttcggaaacctgattgccctgagcctgggcctgacccccaacttcaagagcaacttcgacctggccgaggatgccaaactgcagctgagcaaggacacctacgacgacgacctggacaacctgctggcccagatcggcgaccagtacgccgacctgtttctggccgccaagaacctgtccgacgccatcctgctgagcgacatcctgagagtgaacaccgagatcaccaaggcccccctgagcgcctctatgatcaagagatacgacgagcaccaccaggacctgaccctgctgaaagctctcgtgcggcagcagctgcctgagaagtacaaagagattttcttcgaccagagcaagaacggctacgccggctacattgacggcggagccagccaggaagagttctacaagttcatcaagcccatcctggaaaagatggacggcaccgaggaactgctcgtgaagctgaacagagaggacctgctgcggaagcagcggaccttcgacaacggcagcatcccccaccagatccacctgggagagctgcacgccattctgcggcggcaggaagatttttacccattcctgaaggacaaccgggaaaagatcgagaagatcctgaccttccgcatcccctactacgtgggccctctggccaggggaaacagcagattcgcctggatgaccagaaagagcgaggaaaccatcaccccctggaacttcgaggaagtggtggacaagggcgcttccgcccagagcttcatcgagcggatgaccaacttcgataagaacctgcccaacgagaaggtgctgcccaagcacagcctgctgtacgagtacttcaccgtgtataacgagctgaccaaagtgaaatacgtgaccgagggaatgagaaagcccgccttcctgagcggcgagcagaaaaaggccatcgtggacctgctgttcaagaccaaccggaaagtgaccgtgaagcagctgaaagaggactacttcaagaaaatcgagtgcttcgactccgtggaaatctccggcgtggaagatcggttcaacgcctccctgggcacataccacgatctgctgaaaattatcaaggacaaggacttcctggacaatgaggaaaacgaggacattctggaagatatcgtgctgaccctgacactgtttgaggacagagagatgatcgaggaacggctgaaaacctatgcccacctgttcgacgacaaagtgatgaagcagctgaagcggcggagatacaccggctggggcaggctgagccggaagctgatcaacggcatccgggacaagcagtccggcaagacaatcctggatttcctgaagtccgacggcttcgccaacagaaacttcatgcagctgatccacgacgacagcctgacctttaaagaggacatccagaaagcccaggtgtccggccagggcgatagcctgcacgagcacattgccaatctggccggcagccccgccattaagaagggcatcctgcagacagtgaaggtggtggacgagctcgtgaaagtgatgggccggcacaagcccgagaacatcgtgatcgaaatggccagagagaaccagaccacccagaagggacagaagaacagccgcgagagaatgaagcggatcgaagagggcatcaaagagctgggcagccagatcctgaaagaacaccccgtggaaaacacccagctgcagaacgagaagctgtacctgtactacctgcagaatgggcgggatatgtacgtggaccaggaactggacatcaaccggctgtccgactacgatgtggacgctatcgtgcctcagagctttctgaaggacgactccatcgacaacaaggtgctgaccagaagcgacaagaaccggggcaagagcgacaacgtgccctccgaagaggtcgtgaagaagatgaagaactactggcggcagctgctgaacgccaagctgattacccagagaaagttcgacaatctgaccaaggccgagagaggcggcctgagcgaactggataaggccggcttcatcaagagacagctggtggaaacccggcagatcacaaagcacgtggcacagatcctggactcccggatgaacactaagtacgacgagaatgacaagctgatccgggaagtgaaagtgatcaccctgaagtccaagctggtgtccgatttccggaaggatttccagttttacaaagtgcgcgagatcaacaactaccaccacgcccacgacgcctacctgaacgccgtcgtgggaaccgccctgatcaaaaagtaccctaagctggaaagcgagttcgtgtacggcgactacaaggtgtacgacgtgcggaagatgatcgccaagagcgagcaggaaatcggcaaggctaccgccaagtacttcttctacagcaacatcatgaactttttcaagaccgagattaccctggccaacggcgagatccggaagcggcctctgatcgagacaaacggcgaaaccggggagatcgtgtgggataagggccgggattttgccaccgtgcggaaagtgctgagcatgccccaagtgaatatcgtgaaaaagaccgaggtgcagacaggcggcttcagcaaagagtctatcctgcccaagaggaacagcgataagctgatcgccagaaagaaggactgggaccctaagaagtacggcggcttcgacagccccaccgtggcctattctgtgctggtggtggccaaagtggaaaagggcaagtccaagaaactgaagagtgtgaaagagctgctggggatcaccatcatggaaagaagcagcttcgagaagaatcccatcgactttctggaagccaagggctacaaagaagtgaaaaaggacctgatcatcaagctgcctaagtactccctgttcgagctggaaaacggccggaagagaatgctggcctctgccggcgaactgcagaagggaaacgaactggccctgccctccaaatatgtgaacttcctgtacctggccagccactatgagaagctgaagggctcccccgaggataatgagcagaaacagctgtttgtggaacagcacaagcactacctggacgagatcatcgagcagatcagcgagttctccaagagagtgatcctggccgacgctaatctggacaaagtgctgtccgcctacaacaagcaccgggataagcccatcagagagcaggccgagaatatcatccacctgtttaccctgaccaatctgggagcccctgccgccttcaagtactttgacaccaccatcgaccggaagaggtacaccagcaccaaagaggtgctggacgccaccctgatccaccagagcatcaccggcctgtacgagacacggatcgacctgtctcagctgggaggtgactccggcggctcctccggcggaagcagcggcggcagcagcggcggaagcagcggcggcagcagcggcggaagctctggcggatctagcggcggctctaccctgaacatcgaggacgagtacaggctgcacgagaccagcaaggagcccgacgtgagcctgggcagcacctggctgagcgatttccctcaggcttgggccgagaccggcggcatgggcctggccgtgcggcaggcccccctgattatccccctgaaggccaccagcacccccgtgagcatcaagcagtacccaatgtcccaggaggccaggctgggcatcaagcctcacatccagaggctgctggaccagggcatcctggtgccatgccagtccccctggaacacccctctgctgcccgtgaagaagcctggcaccaacgactaccggcccgtgcaggacctgagagaagtgaacaagcgggtggaggacatccacccaaccgtgcccaacccttacaacctgctgtccggcctgccccccagccaccagtggtacaccgtgctggacctgaaggacgccttcttctgcctgagactgcaccccacctctcagcccctgttcgccttcgagtggcgcgaccccgagatgggcatcagcggccagctgacctggaccagactgccacagggctttaagaatagcccaaccctgtttaacgaggccctgcacagggacctggccgacttcaggatccagcaccccgacctgattctgctgcagtacgtggacgacctgctgctggccgctaccagcgagctggactgccagcagggcaccagagccctgctgcagaccctgggcaacctgggctacagagccagcgccaagaaggcccagatctgtcagaagcaggtgaagtatctgggctacctgctgaaggaaggccagagatggctgaccgaggccagaaaggagactgtgatgggccagcccacccccaagacccccaggcagctgcgggagttcctgggcaaggccggcttttgcagactgtttatccctggcttcgccgagatggccgccccactgtaccctctgaccaagcctggcaccctgtttaactggggccccgaccagcagaaggcctaccaggagatcaagcaggccctgctgaccgcccccgccctgggcctgcccgacctgaccaagcctttcgagctgttcgtggacgagaagcagggatacgccaaaggcgtgctgacccagaagctgggcccctggcggaggcccgtggcctacctgagcaaaaaactggaccctgtggccgccggctggcccccatgcctgcggatggtggccgccatcgctgtgctgaccaaggacgccggcaagctgaccatgggccagcccctggtgatcctggcccctcacgccgtggaggctctggtgaagcagcctccagacaggtggctgtccaacgccaggatgacccactaccaggccctgctgctggacaccgaccgggtgcagttcggccctgtggtggccctgaaccccgccaccctgctgcctctgccagaggagggcctgcagcacaactgcctggacatcctggccgaggcccacggcaccaggcccgacctgaccgaccagcccctgcctgacgccgaccacacctggtacaccgacggcagctccctgctgcaggagggccagaggaaggccggcgccgccgtgaccaccgagaccgaggtgatctgggccaaagccctgcctgccggcacctccgcccagcgggccgagctgatcgccctgacccaggccctgaagatggctgagggcaagaagctgaacgtgtacaccgattccagatacgccttcgccaccgcccacatccacggcgagatctacagaagaaggggctggctgacctccgagggcaaggagatcaagaacaaggacgagattctggccctgctgaaggccctgttcctgcctaagagactgagcatcatccactgtcccggccaccagaagggccacagcgccgaggccagaggcaatagaatggccgaccaggccgccagaaaggccgccatcaccgagacccccgacaccagcaccctgctgatcgagaacagcagccccagcaagagaaccgccgactctcagcacagcaccccccccaagaccaaacggaaggtggagttcgagcccaagaagaagaggaaagtg

SEQ ID NO: 95 - RNA, 6405 nt, synthetic construct
  misc_feature 1..6405: note = Description of Artificial Sequence: Synthetic polynucleotide
  source 1..6405: mol_type = other RNA
atgcccgcggccaagagagtgaagctggacggcggcaaacggacagccgacggaagcgagttcgagtcaccaaagaagaagcggaaagtcgacaagaagtacagcatcggcctggacatcggcaccaactctgtgggctgggccgtgatcaccgacgagtacaaggtgcccagcaagaaattcaaggtgctgggcaacaccgaccggcacagcatcaagaagaacctgatcggagccctgctgttcgacagcggcgaaacagccgaggccacccggctgaagagaaccgccagaagaagatacaccagacggaagaaccggatctgctatctgcaagagatcttcagcaacgagatggccaaggtggacgacagcttcttccacagactggaagagtccttcctggtggaagaggataagaagcacgagcggcaccccatcttcggcaacatcgtggacgaggtggcctaccacgagaagtaccccaccatctaccacctgagaaagaaactggtggacagcaccgacaaggccgacctgcggctgatctatctggccctggcccacatgatcaagttccggggccacttcctgatcgagggcgacctgaaccccgacaacagcgacgtggacaagctgttcatccagctggtgcagacctacaaccagctgttcgaggaaaaccccatcaacgccagcggcgtggacgccaaggccatcctgtctgccagactgagcaagagcagacggctggaaaatctgatcgcccagctgcccggcgagaagaagaatggcctgttcggaaacctgattgccctgagcctgggcctgacccccaacttcaagagcaacttcgacctggccgaggatgccaaactgcagctgagcaaggacacctacgacgacgacctggacaacctgctggcccagatcggcgaccagtacgccgacctgtttctggccgccaagaacctgtccgacgccatcctgctgagcgacatcctgagagtgaacaccgagatcaccaaggcccccctgagcgcctctatgatcaagagatacgacgagcaccaccaggacctgaccctgctgaaagctctcgtgcggcagcagctgcctgagaagtacaaagagattttcttcgaccagagcaagaacggctacgccggctacattgacggcggagccagccaggaagagttctacaagttcatcaagcccatcctggaaaagatggacggcaccgaggaactgctcgtgaagctgaacagagaggacctgctgcggaagcagcggaccttcgacaacggcagcatcccccaccagatccacctgggagagctgcacgccattctgcggcggcaggaagatttttacccattcctgaaggacaaccgggaaaagatcgagaagatcctgaccttccgcatcccctactacgtgggccctctggccaggggaaacagcagattcgcctggatgaccagaaagagcgaggaaaccatcaccccctggaacttcgaggaagtggtggacaagggcgcttccgcccagagcttcatcgagcggatgaccaacttcgataagaacctgcccaacgagaaggtgctgcccaagcacagcctgctgtacgagtacttcaccgtgtataacgagctgaccaaagtgaaatacgtgaccgagggaatgagaaagcccgccttcctgagcggcgagcagaaaaaggccatcgtggacctgctgttcaagaccaaccggaaagtgaccgtgaagcagctgaaagaggactacttcaagaaaatcgagtgcttcgactccgtggaaatctccggcgtggaagatcggttcaacgcctccctgggcacataccacgatctgctgaaaattatcaaggacaaggacttcctggacaatgaggaaaacgaggacattctggaagatatcgtgctgaccctgacactgtttgaggacagagagatgatcgaggaacggctgaaaacctatgcccacctgttcgacgacaaagtgatgaagcagctgaagcggcggagatacaccggctggggcaggctgagccggaagctgatcaacggcatccgggacaagcagtccggcaagacaatcctggatttcctgaagtccgacggcttcgccaacagaaacttcatgcagctgatccacgacgacagcctgacctttaaagaggacatccagaaagcccaggtgtccggccagggcgatagcctgcacgagcacattgccaatctggccggcagccccgccattaagaagggcatcctgcagacagtgaaggtggtggacgagctcgtgaaagtgatgggccggcacaagcccgagaacatcgtgatcgaaatggccagagagaaccagaccacccagaagggacagaagaacagccgcgagagaatgaagcggatcgaagagggcatcaaagagctgggcagccagatcctgaaagaacaccccgtggaaaacacccagctgcagaacgagaagctgtacctgtactacctgcagaatgggcgggatatgtacgtggaccaggaactggacatcaaccggctgtccgactacgatgtggacgctatcgtgcctcagagctttctgaaggacgactccatcgacaacaaggtgctgaccagaagcgacaagaaccggggcaagagcgacaacgtgccctccgaagaggtcgtgaagaagatgaagaactactggcggcagctgctgaacgccaagctgattacccagagaaagttcgacaatctgaccaaggccgagagaggcggcctgagcgaactggataaggccggcttcatcaagagacagctggtggaaacccggcagatcacaaagcacgtggcacagatcctggactcccggatgaacactaagtacgacgagaatgacaagctgatccgggaagtgaaagtgatcaccctgaagtccaagctggtgtccgatttccggaaggatttccagttttacaaagtgcgcgagatcaacaactaccaccacgcccacgacgcctacctgaacgccgtcgtgggaaccgccctgatcaaaaagtaccctaagctggaaagcgagttcgtgtacggcgactacaaggtgtacgacgtgcggaagatgatcgccaagagcgagcaggaaatcggcaaggctaccgccaagtacttcttctacagcaacatcatgaactttttcaagaccgagattaccctggccaacggcgagatccggaagcggcctctgatcgagacaaacggcgaaaccggggagatcgtgtgggataagggccgggattttgccaccgtgcggaaagtgctgagcatgccccaagtgaatatcgtgaaaaagaccgaggtgcagacaggcggcttcagcaaagagtctatcctgcccaagaggaacagcgataagctgatcgccagaaagaaggactgggaccctaagaagtacggcggcttcgacagccccaccgtggcctattctgtgctggtggtggccaaagtggaaaagggcaagtccaagaaactgaagagtgtgaaagagctgctggggatcaccatcatggaaagaagcagcttcgagaagaatcccatcgactttctggaagccaagggctacaaagaagtgaaaaaggacctgatcatcaagctgcctaagtactccctgttcgagctggaaaacggccggaagagaatgctggcctctgccggcgaactgcagaagggaaacgaactggccctgccctccaaatatgtgaacttcctgtacctggccagccactatgagaagctgaagggctcccccgaggataatgagcagaaacagctgtttgtggaacagcacaagcactacctggacgagatcatcgagcagatcagcgagttctccaagagagtgatcctggccgacgctaatctggacaaagtgctgtccgcctacaacaagcaccgggataagcccatcagagagcaggccgagaatatcatccacctgtttaccctgaccaatctgggagcccctgccgccttcaagtactttgacaccaccatcgaccggaagaggtacaccagcaccaaagaggtgctggacgccaccctgatccaccagagcatcaccggcctgtacgagacacggatcgacctgtctcagctgggaggtgactccggcggctcctccggcggaagcagcggcggcagcagcggcggaagcagcggcggcagcagcggcggaagctctggcggatctagcggcggctctaccctgaacatcgaggacgagtacaggctgcacgagaccagcaaggagcccgacgtgagcctgggcagcacctggctgagcgatttccctcaggcttgggccgagaccggcggcatgggcctggccgtgcggcaggcccccctgattatccccctgaaggccaccagcacccccgtgagcatcaagcagtacccaatgtcccaggaggccaggctgggcatcaagcctcacatccagaggctgctggaccagggcatcctggtgccatgccagtccccctggaacacccctctgctgcccgtgaagaagcctggcaccaacgactaccggcccgtgcaggacctgagagaagtgaacaagcgggtggaggacatccacccaaccgtgcccaacccttacaacctgctgtccggcctgccccccagccaccagtggtacaccgtgctggacctgaaggacgccttcttctgcctgagactgcaccccacctctcagcccctgttcgccttcgagtggcgcgaccccgagatgggcatcagcggccagctgacctggaccagactgccacagggctttaagaatagcccaaccctgtttaacgaggccctgcacagggacctggccgacttcaggatccagcaccccgacctgattctgctgcagtacgtggacgacctgctgctggccgctaccagcgagctggactgccagcagggcaccagagccctgctgcagaccctgggcaacctgggctacagagccagcgccaagaaggcccagatctgtcagaagcaggtgaagtatctgggctacctgctgaaggaaggccagagatggctgaccgaggccagaaaggagactgtgatgggccagcccacccccaagacccccaggcagctgcgggagttcctgggcaaggccggcttttgcagactgtttatccctggcttcgccgagatggccgccccactgtaccctctgaccaagcctggcaccctgtttaactggggccccgaccagcagaaggcctaccaggagatcaagcaggccctgctgaccgcccccgccctgggcctgcccgacctgaccaagcctttcgagctgttcgtggacgagaagcagggatacgccaaaggcgtgctgacccagaagctgggcccctggcggaggcccgtggcctacctgagcaaaaaactggaccctgtggccgccggctggcccccatgcctgcggatggtggccgccatcgctgtgctgaccaaggacgccggcaagctgaccatgggccagcccctggtgatcctggcccctcacgccgtggaggctctggtgaagcagcctccagacaggtggctgtccaacgccaggatgacccactaccaggccctgctgctggacaccgaccgggtgcagttcggccctgtggtggccctgaaccccgccaccctgctgcctctgccagaggagggcctgcagcacaactgcctggacatcctggccgaggcccacggcaccaggcccgacctgaccgaccagcccctgcctgacgccgaccacacctggtacaccgacggcagctccctgctgcaggagggccagaggaaggccggcgccgccgtgaccaccgagaccgaggtgatctgggccaaagccctgcctgccggcacctccgcccagcgggccgagctgatcgccctgacccaggccctgaagatggctgagggcaagaagctgaacgtgtacaccgattccagatacgccttcgccaccgcccacatccacggcgagatctacagaagaaggggctggctgacctccgagggcaaggagatcaagaacaaggacgagattctggccctgctgaaggccctgttcctgcctaagagactgagcatcatccactgtcccggccaccagaagggccacagcgccgaggccagaggcaatagaatggccgaccaggccgccagaaaggccgccatcaccgagacccccgacaccagcaccctgctgatcgagaacagcagccccagcaagagaaccgccgactctcagcacagcaccccccccaagaccaaacggaaggtggagttcgagcccaagaagaagaggaaagtg

SEQ ID NO: 96 - protein, 1961 aa, synthetic construct
  REGION 1..1961: note = Description of Artificial Sequence: Synthetic polypeptide
MPAAKRVKLDGGKRTADGSEFESPKKKRKVDKKYSIGLDIGTNSVGWAVITDEYKVPSKKFKVLGNTDRHSIKKNLIGALLFDSGETAEATRLKRTARRRYTRRKNRICYLQEIFSNEMAKVDDSFFHRLEESFLVEEDKKHERHPIFGNIVDEVAYHEKYPTIYHLRKKLVDSTDKADLRLIYLALAHMIKFRGHFLIEGDLNPDNSDVDKLFIQLVQTYNQLFEENPINASGVDAKAILSARLSKSRRLENLIAQLPGEKKNGLFGNLIALSLGLTPNFKSNFDLAEDAKLQLSKDTYDDDLDNLLAQIGDQYADLFLAAKNLSDAILLSDILRVNTEITKAPLSASMIKRYDEHHQDLTLLKALVRQQLPEKYKEIFFDQSKNGYAGYIDGGASQEEFYKFIKPILEKMDGTEELLVKLNREDLLRKQRTFDNGSIPHQIHLGELHAILRRQEDFYPFLKDNREKIEKILTFRIPYYVGPLARGNSRFAWMTRKSEETITPWNFEEVVDKGASAQSFIERMTNFDKNLPNEKVLPKHSLLYEYFTVYNELTKVKYVTEGMRKPAFLSGEQKKAIVDLLFKTNRKVTVKQLKEDYFKKIECFDSVEISGVEDRFNASLGTYHDLLKIIKDKDFLDNEENEDILEDIVLTLTLFEDREMIEERLKTYAHLFDDKVMKQLKRRRYTGWGRLSRKLINGIRDKQSGKTILDFLKSDGFANRNFMQLIHDDSLTFKEDIQKAQVSGQGDSLHEHIANLAGSPAIKKGILQTVKVVDELVKVMGRHKPENIVIEMARENQTTQKGQKNSRERMKRIEEGIKELGSQILKEHPVENTQLQNEKLYLYYLQNGRDMYVDQELDINRLSDYDVDAIVPQSFLKDDSIDNKVLTRSDKNRGKSDNVPSEEVVKKMKNYWRQLLNAKLITQRKFDNLTKAERGGLSELDKAGFIKRQLVETRQITKHVAQILDSRMNTKYDENDKLIREVKVITLKSKLVSDFRKDFQFYKVREINNYHHAHDAYLNAVVGTALIKKYPKLESEFVYGDYKVYDVRKMIAKSEQEIGKATAKYFFYSNIMNFFKTEITLANGEIRKRPLIETNGETGEIVWDKGRDFATVRKVLSMPQVNIVKKTEVQTGGFSKESILPKRNSDKLIARKKDWDPKKYGGFDSPTVAYSVLVVAKVEKGKSKKLKSVKELLGITIMERSSFEKNPIDFLEAKGYKEVKKDLIIKLPKYSLFELENGRKRMLASAGELQKGNELALPSKYVNFLYLASHYEKLKGSPEDNEQKQLFVEQHKHYLDEIIEQISEFSKRVILADANLDKVLSAYNKHRDKPIREQAENIIHLFTLTNLGAPAAFKYFDTTIDRKRYTSTKEVLDATLIHQSITGLYETRIDLSQLGGDSGGSSGGSSGGSSGGSSGGSSGGSSGGSSGGSTLNIEDEYRLHETSKEPDVSLGSTWLSDFPQAWAETGGMGLAVRQAPLIIPLKATSTPVSIKQYPMSQEARLGIKPHIQRLLDQGILVPCQSPWNTPLLPVKKPGTNDYRPVQDLREVNKRVEDIHPTVPNPYNLLSGLPPSHQWYTVLDLKDAFFCLRLHPTSQPLFAFEWRDPEMGISGQLTWTRLPQGFKNSPTLFNEALHRDLADFRIQHPDLILLQYVDDLLLAATSELDCQQGTRALLQTLGNLGYRASAKKAQICQKQVKYLGYLLKEGQRWLTEARKETVMGQPTPKTPRQLREFLGKAGFCRLFIPGFAEMAAPLYPLTKPGTLFNWGPDQQKAYQEIKQALLTAPALGLPDLTKPFELFVDEKQGYAKGVLTQKLGPWRRPVAYLSKKLDPVAAGWPPCLRMVAAIAVLTKDAGKLTMGQPLVILAPHAVEALVKQPPDRWLSNARMTHYQALLLDTDRVQFGPVVALNPATLLPLPEEGLQHNCLDILAEAHGKRTADSQHSTPPKTKRKVEFEPKKKRKV

SEQ ID NO: 97 - DNA, 5883 bp, synthetic construct
  misc_feature 1..5883: note = Description of Artificial Sequence: Synthetic polynucleotide
  source 1..5883: mol_type = other DNA
atgcccgcggccaagagagtgaagctggacggcggcaaacggacagccgacggaagcgagttcgagtcaccaaagaagaagcggaaagtcgacaagaagtacagcatcggcctggacatcggcaccaactctgtgggctgggccgtgatcaccgacgagtacaaggtgcccagcaagaaattcaaggtgctgggcaacaccgaccggcacagcatcaagaagaacctgatcggagccctgctgttcgacagcggcgaaacagccgaggccacccggctgaagagaaccgccagaagaagatacaccagacggaagaaccggatctgctatctgcaagagatcttcagcaacgagatggccaaggtggacgacagcttcttccacagactggaagagtccttcctggtggaagaggataagaagcacgagcggcaccccatcttcggcaacatcgtggacgaggtggcctaccacgagaagtaccccaccatctaccacctgagaaagaaactggtggacagcaccgacaaggccgacctgcggctgatctatctggccctggcccacatgatcaagttccggggccacttcctgatcgagggcgacctgaaccccgacaacagcgacgtggacaagctgttcatccagctggtgcagacctacaaccagctgttcgaggaaaaccccatcaacgccagcggcgtggacgccaaggccatcctgtctgccagactgagcaagagcagacggctggaaaatctgatcgcccagctgcccggcgagaagaagaatggcctgttcggaaacctgattgccctgagcctgggcctgacccccaacttcaagagcaacttcgacctggccgaggatgccaaactgcagctgagcaaggacacctacgacgacgacctggacaacctgctggcccagatcggcgaccagtacgccgacctgtttctggccgccaagaacctgtccgacgccatcctgctgagcgacatcctgagagtgaacaccgagatcaccaaggcccccctgagcgcctctatgatcaagagatacgacgagcaccaccaggacctgaccctgctgaaagctctcgtgcggcagcagctgcctgagaagtacaaagagattttcttcgaccagagcaagaacggctacgccggctacattgacggcggagccagccaggaagagttctacaagttcatcaagcccatcctggaaaagatggacggcaccgaggaactgctcgtgaagctgaacagagaggacctgctgcggaagcagcggaccttcgacaacggcagcatcccccaccagatccacctgggagagctgcacgccattctgcggcggcaggaagatttttacccattcctgaaggacaaccgggaaaagatcgagaagatcctgaccttccgcatcccctactacgtgggccctctggccaggggaaacagcagattcgcctggatgaccagaaagagcgaggaaaccatcaccccctggaacttcgaggaagtggtggacaagggcgcttccgcccagagcttcatcgagcggatgaccaacttcgataagaacctgcccaacgagaaggtgctgcccaagcacagcctgctgtacgagtacttcaccgtgtataacgagctgaccaaagtgaaatacgtgaccgagggaatgagaaagcccgccttcctgagcggcgagcagaaaaaggccatcgtggacctgctgttcaagaccaaccggaaagtgaccgtgaagcagctgaaagaggactacttcaagaaaatcgagtgcttcgactccgtggaaatctccggcgtggaagatcggttcaacgcctccctgggcacataccacgatctgctgaaaattatcaaggacaaggacttcctggacaatgaggaaaacgaggacattctggaagatatcgtgctgaccctgacactgtttgaggacagagagatgatcgaggaacggctgaaaacctatgcccacctgttcgacgacaaagtgatgaagcagctgaagcggcggagatacaccggctggggcaggctgagccggaagctgatcaacggcatccgggacaagcagtccggcaagacaatcctggatttcctgaagtccgacggcttcgccaacagaaacttcatgcagctgatccacgacgacagcctgacctttaaagaggacatccagaaagcccaggtgtccggccagggcgatagcctgcacgagcacattgccaatctggccggcagccccgccattaagaagggcatcctgcagacagtgaaggtggtggacgagctcgtgaaagtgatgggccggcacaagcccgagaacatcgtgatcgaaatggccagagagaaccagaccacccagaagggacagaagaacagccgcgagagaatgaagcggatcgaagagggcatcaaagagctgggcagccagatcctgaaagaacaccccgtggaaaacacccagctgcagaacgagaagctgtacctgtactacctgcagaatgggcgggatatgtacgtggaccaggaactggacatcaaccggctgtccgactacgatgtggacgctatcgtgcctcagagctttctgaaggacgactccatcgacaacaaggtgctgaccagaagcgacaagaaccggggcaagagcgacaacgtgccctccgaagaggtcgtgaagaagatgaagaactactggcggcagctgctgaacgccaagctgattacccagagaaagttcgacaatctgaccaaggccgagagaggcggcctgagcgaactggataaggccggcttcatcaagagacagctggtggaaacccggcagatcacaaagcacgtggcacagatcctggactcccggatgaacactaagtacgacgagaatgacaagctgatccgggaagtgaaagtgatcaccctgaagtccaagctggtgtccgatttccggaaggatttccagttttacaaagtgcgcgagatcaacaactaccaccacgcccacgacgcctacctgaacgccgtcgtgggaaccgccctgatcaaaaagtaccctaagctggaaagcgagttcgtgtacggcgactacaaggtgtacgacgtgcggaagatgatcgccaagagcgagcaggaaatcggcaaggctaccgccaagtacttcttctacagcaacatcatgaactttttcaagaccgagattaccctggccaacggcgagatccggaagcggcctctgatcgagacaaacggcgaaaccggggagatcgtgtgggataagggccgggattttgccaccgtgcggaaagtgctgagcatgccccaagtgaatatcgtgaaaaagaccgaggtgcagacaggcggcttcagcaaagagtctatcctgcccaagaggaacagcgataagctgatcgccagaaagaaggactgggaccctaagaagtacggcggcttcgacagccccaccgtggcctattctgtgctggtggtggccaaagtggaaaagggcaagtccaagaaactgaagagtgtgaaagagctgctggggatcaccatcatggaaagaagcagcttcgagaagaatcccatcgactttctggaagccaagggctacaaagaagtgaaaaaggacctgatcatcaagctgcctaagtactccctgttcgagctggaaaacggccggaagagaatgctggcctctgccggcgaactgcagaagggaaacgaactggccctgccctccaaatatgtgaacttcctgtacctggccagccactatgagaagctgaagggctcccccgaggataatgagcagaaacagctgtttgtggaacagcacaagcactacctggacgagatcatcgagcagatcagcgagttctccaagagagtgatcctggccgacgctaatctggacaaagtgctgtccgcctacaacaagcaccgggataagcccatcagagagcaggccgagaatatcatccacctgtttaccctgaccaatctgggagcccctgccgccttcaagtactttgacaccaccatcgaccggaagaggtacaccagcaccaaagaggtgctggacgccaccctgatccaccagagcatcaccggcctgtacgagacacggatcgacctgtctcagctgggaggtgactccggcggctcctccggcggaagcagcggcggcagcagcggcggaagcagcggcggcagcagcggcggaagctctggcggatctagcggcggctctaccctgaacatcgaggacgagtacaggctgcacgagaccagcaaggagcccgacgtgagcctgggcagcacctggctgagcgatttccctcaggcttgggccgagaccggcggcatgggcctggccgtgcggcaggcccccctgattatccccctgaaggccaccagcacccccgtgagcatcaagcagtacccaatgtcccaggaggccaggctgggcatcaagcctcacatccagaggctgctggaccagggcatcctggtgccatgccagtccccctggaacacccctctgctgcccgtgaagaagcctggcaccaacgactaccggcccgtgcaggacctgagagaagtgaacaagcgggtggaggacatccacccaaccgtgcccaacccttacaacctgctgtccggcctgccccccagccaccagtggtacaccgtgctggacctgaaggacgccttcttctgcctgagactgcaccccacctctcagcccctgttcgccttcgagtggcgcgaccccgagatgggcatcagcggccagctgacctggaccagactgccacagggctttaagaatagcccaaccctgtttaacgaggccctgcacagggacctggccgacttcaggatccagcaccccgacctgattctgctgcagtacgtggacgacctgctgctggccgctaccagcgagctggactgccagcagggcaccagagccctgctgcagaccctgggcaacctgggctacagagccagcgccaagaaggcccagatctgtcagaagcaggtgaagtatctgggctacctgctgaaggaaggccagagatggctgaccgaggccagaaaggagactgtgatgggccagcccacccccaagacccccaggcagctgcgggagttcctgggcaaggccggcttttgcagactgtttatccctggcttcgccgagatggccgccccactgtaccctctgaccaagcctggcaccctgtttaactggggccccgaccagcagaaggcctaccaggagatcaagcaggccctgctgaccgcccccgccctgggcctgcccgacctgaccaagcctttcgagctgttcgtggacgagaagcagggatacgccaaaggcgtgctgacccagaagctgggcccctggcggaggcccgtggcctacctgagcaaaaaactggaccctgtggccgccggctggcccccatgcctgcggatggtggccgccatcgctgtgctgaccaaggacgccggcaagctgaccatgggccagcccctggtgatcctggcccctcacgccgtggaggctctggtgaagcagcctccagacaggtggctgtccaacgccaggatgacccactaccaggccctgctgctggacaccgaccgggtgcagttcggccctgtggtggccctgaaccccgccaccctgctgcctctgccagaggagggcctgcagcacaactgcctggacatcctggccgaggcccacggcaagagaaccgccgactctcagcacagcaccccccccaagaccaaacggaaggtggagttcgagcccaagaagaagaggaaagtg

SEQ ID NO: 98 - RNA, 5883 nt, synthetic construct
  misc_feature 1..5883: note = Description of Artificial Sequence: Synthetic polynucleotide
  source 1..5883: mol_type = other RNA
atgcccgcggccaagagagtgaagctggacggcggcaaacggacagccgacggaagcgagttcgagtcaccaaagaagaagcggaaagtcgacaagaagtacagcatcggcctggacatcggcaccaactctgtgggctgggccgtgatcaccgacgagtacaaggtgcccagcaagaaattcaaggtgctgggcaacaccgaccggcacagcatcaagaagaacctgatcggagccctgctgttcgacagcggcgaaacagccgaggccacccggctgaagagaaccgccagaagaagatacaccagacggaagaaccggatctgctatctgcaagagatcttcagcaacgagatggccaaggtggacgacagcttcttccacagactggaagagtccttcctggtggaagaggataagaagcacgagcggcaccccatcttcggcaacatcgtggacgaggtggcctaccacgagaagtaccccaccatctaccacctgagaaagaaactggtggacagcaccgacaaggccgacctgcggctgatctatctggccctggcccacatgatcaagttccggggccacttcctgatcgagggcgacctgaaccccgacaacagcgacgtggacaagctgttcatccagctggtgcagacctacaaccagctgttcgaggaaaaccccatcaacgccagcggcgtggacgccaaggccatcctgtctgccagactgagcaagagcagacggctggaaaatctgatcgcccagctgcccggcgagaagaagaatggcctgttcggaaacctgattgccctgagcctgggcctgacccccaacttcaagagcaacttcgacctggccgaggatgccaaactgcagctgagcaaggacacctacgacgacgacctggacaacctgctggcccagatcggcgaccagtacgccgacctgtttctggccgccaagaacctgtccgacgccatcctgctgagcgacatcctgagagtgaacaccgagatcaccaaggcccccctgagcgcctctatgatcaagagatacgacgagcaccaccaggacctgaccctgctgaaagctctcgtgcggcagcagctgcctgagaagtacaaagagattttcttcgaccagagcaagaacggctacgccggctacattgacggcggagccagccaggaagagttctacaagttcatcaagcccatcctggaaaagatggacggcaccgaggaactgctcgtgaagctgaacagagaggacctgctgcggaagcagcggaccttcgacaacggcagcatcccccaccagatccacctgggagagctgcacgccattctgcggcggcaggaagatttttacccattcctgaaggacaaccgggaaaagatcgagaagatcctgaccttccgcatcccctactacgtgggccctctggccaggggaaacagcagattcgcctggatgaccagaaagagcgaggaaaccatcaccccctggaacttcgaggaagtggtggacaagggcgcttccgcccagagcttcatcgagcggatgaccaacttcgataagaacctgcccaacgagaaggtgctgcccaagcacagcctgctgtacgagtacttcaccgtgtataacgagctgaccaaagtgaaatacgtgaccgagggaatgagaaagcccgccttcctgagcggcgagcagaaaaaggccatcgtggacctgctgttcaagaccaaccggaaagtgaccgtgaagcagctgaaagaggactacttcaagaaaatcgagtgcttcgactccgtggaaatctccggcgtggaagatcggttcaacgcctccctgggcacataccacgatctgctgaaaattatcaaggacaaggacttcctggacaatgaggaaaacgaggacattctggaagatatcgtgctgaccctgacactgtttgaggacagagagatgatcgaggaacggctgaaaacctatgcccacctgttcgacgacaaagtgatgaagcagctgaagcggcggagatacaccggctggggcaggctgagccggaagctgatcaacggcatccgggacaagcagtccggcaagacaatcctggatttcctgaagtccgacggcttcgccaacagaaacttcatgcagctgatccacgacgacagcctgacctttaaagaggacatccagaaagcccaggtgtccggccagggcgatagcctgcacgagcacattgccaatctggccggcagccccgccattaagaagggcatcctgcagacagtgaaggtggtggacgagctcgtgaaagtgatgggccggcacaagcccgagaacatcgtgatcgaaatggccagagagaaccagaccacccagaagggacagaagaacagccgcgagagaatgaagcggatcgaagagggcatcaaagagctgggcagccagatcctgaaagaacaccccgtggaaaacacccagctgcagaacgagaagctgtacctgtactacctgcagaatgggcgggatatgtacgtggaccaggaactggacatcaaccggctgtccgactacgatgtggacgctatcgtgcctcagagctttctgaaggacgactccatcgacaacaaggtgctgaccagaagcgacaagaaccggggcaagagcgacaacgtgccctccgaagaggtcgtgaagaagatgaagaactactggcggcagctgctgaacgccaagctgattacccagagaaagttcgacaatctgaccaaggccgagagaggcggcctgagcgaactggataaggccggcttcatcaagagacagctggtggaaacccggcagatcacaaagcacgtggcacagatcctggactcccggatgaacactaagtacgacgagaatgacaagctgatccgggaagtgaaagtgatcaccctgaagtccaagctggtgtccgatttccggaaggatttccagttttacaaagtgcgcgagatcaacaactaccaccacgcccacgacgcctacctgaacgccgtcgtgggaaccgccctgatcaaaaagtaccctaagctggaaagcgagttcgtgtacggcgactacaaggtgtacgacgtgcggaagatgatcgccaagagcgagcaggaaatcggcaaggctaccgccaagtacttcttctacagcaacatcatgaactttttcaagaccgagattaccctggccaacggcgagatccggaagcggcctctgatcgagacaaacggcgaaaccggggagatcgtgtgggataagggccgggattttgccaccgtgcggaaagtgctgagcatgccccaagtgaatatcgtgaaaaagaccgaggtgcagacaggcggcttcagcaaagagtctatcctgcccaagaggaacagcgataagctgatcgccagaaagaaggactgggaccctaagaagtacggcggcttcgacagccccaccgtggcctattctgtgctggtggtggccaaagtggaaaagggcaagtccaagaaactgaagagtgtgaaagagctgctggggatcaccatcatggaaagaagcagcttcgagaagaatcccatcgactttctggaagccaagggctacaaagaagtgaaaaaggacctgatcatcaagctgcctaagtactccctgttcgagctggaaaacggccggaagagaatgctggcctctgccggcgaactgcagaagggaaacgaactggccctgccctccaaatatgtgaacttcctgtacctggccagccactatgagaagctgaagggctcccccgaggataatgagcagaaacagctgtttgtggaacagcacaagcactacctggacgagatcatcgagcagatcagcgagttctccaagagagtgatcctggccgacgctaatctggacaaagtgctgtccgcctacaacaagcaccgggataagcccatcagagagcaggccgagaatatcatccacctgtttaccctgaccaatctgggagcccctgccgccttcaagtactttgacaccaccatcgaccggaagaggtacaccagcaccaaagaggtgctggacgccaccctgatccaccagagcatcaccggcctgtacgagacacggatcgacctgtctcagctgggaggtgactccggcggctcctccggcggaagcagcggcggcagcagcggcggaagcagcggcggcagcagcggcggaagctctggcggatctagcggcggctctaccctgaacatcgaggacgagtacaggctgcacgagaccagcaaggagcccgacgtgagcctgggcagcacctggctgagcgatttccctcaggcttgggccgagaccggcggcatgggcctggccgtgcggcaggcccccctgattatccccctgaaggccaccagcacccccgtgagcatcaagcagtacccaatgtcccaggaggccaggctgggcatcaagcctcacatccagaggctgctggaccagggcatcctggtgccatgccagtccccctggaacacccctctgctgcccgtgaagaagcctggcaccaacgactaccggcccgtgcaggacctgagagaagtgaacaagcgggtggaggacatccacccaaccgtgcccaacccttacaacctgctgtccggcctgccccccagccaccagtggtacaccgtgctggacctgaaggacgccttcttctgcctgagactgcaccccacctctcagcccctgttcgccttcgagtggcgcgaccccgagatgggcatcagcggccagctgacctggaccagactgccacagggctttaagaatagcccaaccctgtttaacgaggccctgcacagggacctggccgacttcaggatccagcaccccgacctgattctgctgcagtacgtggacgacctgctgctggccgctaccagcgagctggactgccagcagggcaccagagccctgctgcagaccctgggcaacctgggctacagagccagcgccaagaaggcccagatctgtcagaagcaggtgaagtatctgggctacctgctgaaggaaggccagagatggctgaccgaggccagaaaggagactgtgatgggccagcccacccccaagacccccaggcagctgcgggagttcctgggcaaggccggcttttgcagactgtttatccctggcttcgccgagatggccgccccactgtaccctctgaccaagcctggcaccctgtttaactggggccccgaccagcagaaggcctaccaggagatcaagcaggccctgctgaccgcccccgccctgggcctgcccgacctgaccaagcctttcgagctgttcgtggacgagaagcagggatacgccaaaggcgtgctgacccagaagctgggcccctggcggaggcccgtggcctacctgagcaaaaaactggaccctgtggccgccggctggcccccatgcctgcggatggtggccgccatcgctgtgctgaccaaggacgccggcaagctgaccatgggccagcccctggtgatcctggcccctcacgccgtggaggctctggtgaagcagcctccagacaggtggctgtccaacgccaggatgacccactaccaggccctgctgctggacaccgaccgggtgcagttcggccctgtggtggccctgaaccccgccaccctgctgcctctgccagaggagggcctgcagcacaactgcctggacatcctggccgaggcccacggcaagagaaccgccgactctcagcacagcaccccccccaagaccaaacggaaggtggagttcgagcccaagaagaagaggaaagtg

SEQ ID NO: 99 - protein, 1930 aa, synthetic construct
  REGION 1..1930: note = Description of Artificial Sequence: Synthetic polypeptide
MKRTADGSEFESPKKKRKVDKKYSIGLDIGTNSVGWAVITDEYKVPSKKFKVLGNTDRHSIKKNLIGALLFDSGETAEATRLKRTARRRYTRRKNRICYLQEIFSNEMAKVDDSFFHRLEESFLVEEDKKHERHPIFGNIVDEVAYHEKYPTIYHLRKKLVDSTDKADLRLIYLALAHMIKFRGHFLIEGDLNPDNSDVDKLFIQLVQTYNQLFEENPINASGVDAKAILSARLSKSRRLENLIAQLPGEKKNGLFGNLIALSLGLTPNFKSNFDLAEDAKLQLSKDTYDDDLDNLLAQIGDQYADLFLAAKNLSDAILLSDILRVNTEITKAPLSASMIKRYDEHHQDLTLLKALVRQQLPEKYKEIFFDQSKNGYAGYIDGGASQEEFYKFIKPILEKMDGTEELLVKLNREDLLRKQRTFDNGSIPHQIHLGELHAILRRQEDFYPFLKDNREKIEKILTFRIPYYVGPLARGNSRFAWMTRKSEETITPWNFEEVVDKGASAQSFIERMTNFDKNLPNEKVLPKHSLLYEYFTVYNELTKVKYVTEGMRKPAFLSGEQKKAIVDLLFKTNRKVTVKQLKEDYFKKIECFDSVEISGVEDRFNASLGTYHDLLKIIKDKDFLDNEENEDILEDIVLTLTLFEDREMIEERLKTYAHLFDDKVMKQLKRRRYTGWGRLSRKLINGIRDKQSGKTILDFLKSDGFANRNFMQLIHDDSLTFKEDIQKAQVSGQGDSLHEHIANLAGSPAIKKGILQTVKVVDELVKVMGRHKPENIVIEMARENQTTQKGQKNSRERMKRIEEGIKELGSQILKEHPVENTQLQNEKLYLYYLQNGRDMYVDQELDINRLSDYDVDAIVPQSFLKDDSIDNKVLTRSDKNRGKSDNVPSEEVVKKMKNYWRQLLNAKLITQRKFDNLTKAERGGLSELDKAGFIKRQLVETRQITKHVAQILDSRMNTKYDENDKLIREVKVITLKSKLVSDFRKDFQFYKVREINNYHHAHDAYLNAVVGTALIKKYPKLESEFVYGDYKVYDVRKMIAKSEQEIGKATAKYFFYSNIMNFFKTEITLANGEIRKRPLIETNGETGEIVWDKGRDFATVRKVLSMPQVNIVKKTEVQTGGFSKESILPKRNSDKLIARKKDWDPKKYGGFDSPTVAYSVLVVAKVEKGKSKKLKSVKELLGITIMERSSFEKNPIDFLEAKGYKEVKKDLIIKLPKYSLFELENGRKRMLASAGELQKGNELALPSKYVNFLYLASHYEKLKGSPEDNEQKQLFVEQHKHYLDEIIEQISEFSKRVILADANLDKVLSAYNKHRDKPIREQAENIIHLFTLTNLGAPAAFKYFDTTIDRKRYTSTKEVLDATLIHQSITGLYETRIDLSQLGGDSGGSSGGSSGSETPGTSESATPESSGGSSGGSSTLNIEDEYRLHETSKEPDVSLGSTWLSDFPQAWAETGGMGLAVRQAPLIIPLKATSTPVSIKQYPMSQEARLGIKPHIQRLLDQGILVPCQSPWNTPLLPVKKPGTNDYRPVQDLREVNKRVEDIHPTVPNPYNLLSGLPPSHQWYTVLDLKDAFFCLRLHPTSQPLFAFEWRDPEMGISGQLTWTRLPQGFKNSPTLFNEALHRDLADFRIQHPDLILLQYVDDLLLAATSELDCQQGTRALLQTLGNLGYRASAKKAQICQKQVKYLGYLLKEGQRWLTEARKETVMGQPTPKTPRQLREFLGKAGFCRLFIPGFAEMAAPLYPLTKPGTLFNWGPDQQKAYQEIKQALLTAPALGLPDLTKPFELFVDEKQGYAKGVLTQKLGPWRRPVAYLSKKLDPVAAGWPPCLRMVAAIAVLTKDAGKLTMGQPLVILAPHAVEALVKQPPDRWLSNARMTHYQALLLDTDRVQFGPVVALNPATLLPLPEEGLQHNCLDILAEAHGPKKKRKV

SEQ ID NO: 100 - DNA, 5790 bp, synthetic construct
  misc_feature 1..5790: note = Description of Artificial Sequence: Synthetic polynucleotide
  source 1..5790: mol_type = other DNA
atgaaacggacagccgacggaagcgagttcgagtcaccaaagaagaagcggaaagtcgacaagaagtacagcatcggcctggacatcggcaccaactctgtgggctgggccgtgatcaccgacgagtacaaggtgcccagcaagaaattcaaggtgctgggcaacaccgaccggcacagcatcaagaagaacctgatcggagccctgctgttcgacagcggcgaaacagccgaggccacccggctgaagagaaccgccagaagaagatacaccagacggaagaaccggatctgctatctgcaagagatcttcagcaacgagatggccaaggtggacgacagcttcttccacagactggaagagtccttcctggtggaagaggataagaagcacgagcggcaccccatcttcggcaacatcgtggacgaggtggcctaccacgagaagtaccccaccatctaccacctgagaaagaaactggtggacagcaccgacaaggccgacctgcggctgatctatctggccctggcccacatgatcaagttccggggccacttcctgatcgagggcgacctgaaccccgacaacagcgacgtggacaagctgttcatccagctggtgcagacctacaaccagctgttcgaggaaaaccccatcaacgccagcggcgtggacgccaaggccatcctgtctgccagactgagcaagagcagacggctggaaaatctgatcgcccagctgcccggcgagaagaagaatggcctgttcggaaacctgattgccctgagcctgggcctgacccccaacttcaagagcaacttcgacctggccgaggatgccaaactgcagctgagcaaggacacctacgacgacgacctggacaacctgctggcccagatcggcgaccagtacgccgacctgtttctggccgccaagaacctgtccgacgccatcctgctgagcgacatcctgagagtgaacaccgagatcaccaaggcccccctgagcgcctctatgatcaagagatacgacgagcaccaccaggacctgaccctgctgaaagctctcgtgcggcagcagctgcctgagaagtacaaagagattttcttcgaccagagcaagaacggctacgccggctacattgacggcggagccagccaggaagagttctacaagttcatcaagcccatcctggaaaagatggacggcaccgaggaactgctcgtgaagctgaacagagaggacctgctgcggaagcagcggaccttcgacaacggcagcatcccccaccagatccacctgggagagctgcacgccattctgcggcggcaggaagatttttacccattcctgaaggacaaccgggaaaagatcgagaagatcctgaccttccgcatcccctactacgtgggccctctggccaggggaaacagcagattcgcctggatgaccagaaagagcgaggaaaccatcaccccctggaacttcgaggaagtggtggacaagggcgcttccgcccagagcttcatcgagcggatgaccaacttcgataagaacctgcccaacgagaaggtgctgcccaagcacagcctgctgtacgagtacttcaccgtgtataacgagctgaccaaagtgaaatacgtgaccgagggaatgagaaagcccgccttcctgagcggcgagcagaaaaaggccatcgtggacctgctgttcaagaccaaccggaaagtgaccgtgaagcagctgaaagaggactacttcaagaaaatcgagtgcttcgactccgtggaaatctccggcgtggaagatcggttcaacgcctccctgggcacataccacgatctgctgaaaattatcaaggacaaggacttcctggacaatgaggaaaacgaggacattctggaagatatcgtgctgaccctgacactgtttgaggacagagagatgatcgaggaacggctgaaaacctatgcccacctgttcgacgacaaagtgatgaagcagctgaagcggcggagatacaccggctggggcaggctgagccggaagctgatcaacggcatccgggacaagcagtccggcaagacaatcctggatttcctgaagtccgacggcttcgccaacagaaacttcatgcagctgatccacgacgacagcctgacctttaaagaggacatccagaaagcccaggtgtccggccagggcgatagcctgcacgagcacattgccaatctggccggcagccccgccattaagaagggcatcctgcagacagtgaaggtggtggacgagctcgtgaaagtgatgggccggcacaagcccgagaacatcgtgatcgaaatggccagagagaaccagaccacccagaagggacagaagaacagccgcgagagaatgaagcggatcgaagagggcatcaaagagctgggcagccagatcctgaaagaacaccccgtggaaaacacccagctgcagaacgagaagctgtacctgtactacctgcagaatgggcgggatatgtacgtggaccaggaactggacatcaaccggctgtccgactacgatgtggacgctatcgtgcctcagagctttctgaaggacgactccatcgacaacaaggtgctgaccagaagcgacaagaaccggggcaagagcgacaacgtgccctccgaagaggtcgtgaagaagatgaagaactactggcggcagctgctgaacgccaagctgattacccagagaaagttcgacaatctgaccaaggccgagagaggcggcctgagcgaactggataaggccggcttcatcaagagacagctggtggaaacccggcagatcacaaagcacgtggcacagatcctggactcccggatgaacactaagtacgacgagaatgacaagctgatccgggaagtgaaagtgatcaccctgaagtccaagctggtgtccgatttccggaaggatttccagttttacaaagtgcgcgagatcaacaactaccaccacgcccacgacgcctacctgaacgccgtcgtgggaaccgccctgatcaaaaagtaccctaagctggaaagcgagttcgtgtacggcgactacaaggtgtacgacgtgcggaagatgatcgccaagagcgagcaggaaatcggcaaggctaccgccaagtacttcttctacagcaacatcatgaactttttcaagaccgagattaccctggccaacggcgagatccggaagcggcctctgatcgagacaaacggcgaaaccggggagatcgtgtgggataagggccgggattttgccaccgtgcggaaagtgctgagcatgccccaagtgaatatcgtgaaaaagaccgaggtgcagacaggcggcttcagcaaagagtctatcctgcccaagaggaacagcgataagctgatcgccagaaagaaggactgggaccctaagaagtacggcggcttcgacagccccaccgtggcctattctgtgctggtggtggccaaagtggaaaagggcaagtccaagaaactgaagagtgtgaaagagctgctggggatcaccatcatggaaagaagcagcttcgagaagaatcccatcgactttctggaagccaagggctacaaagaagtgaaaaaggacctgatcatcaagctgcctaagtactccctgttcgagctggaaaacggccggaagagaatgctggcctctgccggcgaactgcagaagggaaacgaactggccctgccctccaaatatgtgaacttcctgtacctggccagccactatgagaagctgaagggctcccccgaggataatgagcagaaacagctgtttgtggaacagcacaagcactacctggacgagatcatcgagcagatcagcgagttctccaagagagtgatcctggccgacgctaatctggacaaagtgctgtccgcctacaacaagcaccgggataagcccatcagagagcaggccgagaatatcatccacctgtttaccctgaccaatctgggagcccctgccgccttcaagtactttgacaccaccatcgaccggaagaggtacaccagcaccaaagaggtgctggacgccaccctgatccaccagagcatcaccggcctgtacgagacacggatcgacctgtctcagctgggaggtgactccggcggctccagcggcggcagcagcggcagcgagacccccggcaccagcgagagcgccaccccagagagctccggcggcagcagcggcggcagcagcaccctgaacatcgaggacgagtacaggctgcacgagaccagcaaggagcccgacgtgagcctgggcagcacctggctgagcgatttccctcaggcttgggccgagaccggcggcatgggcctggccgtgcggcaggcccccctgattatccccctgaaggccaccagcacccccgtgagcatcaagcagtacccaatgtcccaggaggccaggctgggcatcaagcctcacatccagaggctgctggaccagggcatcctggtgccatgccagtccccctggaacacccctctgctgcccgtgaagaagcctggcaccaacgactaccggcccgtgcaggacctgagagaagtgaacaagcgggtggaggacatccacccaaccgtgcccaacccttacaacctgctgtccggcctgccccccagccaccagtggtacaccgtgctggacctgaaggacgccttcttctgcctgagactgcaccccacctctcagcccctgttcgccttcgagtggcgcgaccccgagatgggcatcagcggccagctgacctggaccagactgccacagggctttaagaatagcccaaccctgtttaacgaggccctgcacagggacctggccgacttcaggatccagcaccccgacctgattctgctgcagtacgtggacgacctgctgctggccgctaccagcgagctggactgccagcagggcaccagagccctgctgcagaccctgggcaacctgggctacagagccagcgccaagaaggcccagatctgtcagaagcaggtgaagtatctgggctacctgctgaaggaaggccagagatggctgaccgaggccagaaaggagactgtgatgggccagcccacccccaagacccccaggcagctgcgggagttcctgggcaaggccggcttttgcagactgtttatccctggcttcgccgagatggccgccccactgtaccctctgaccaagcctggcaccctgtttaactggggccccgaccagcagaaggcctaccaggagatcaagcaggccctgctgaccgcccccgccctgggcctgcccgacctgaccaagcctttcgagctgttcgtggacgagaagcagggatacgccaaaggcgtgctgacccagaagctgggcccctggcggaggcccgtggcctacctgagcaaaaaactggaccctgtggccgccggctggcccccatgcctgcggatggtggccgccatcgctgtgctgaccaaggacgccggcaagctgaccatgggccagcccctggtgatcctggcccctcacgccgtggaggctctggtgaagcagcctccagacaggtggctgtccaacgccaggatgacccactaccaggccctgctgctggacaccgaccgggtgcagttcggccctgtggtggccctgaaccccgccaccctgctgcctctgccagaggagggcctgcagcacaactgcctggacatcctggccgaggcccacggccccaagaagaagaggaaagtc

SEQ ID NO: 101 - RNA, 5790 nt, synthetic construct
  misc_feature 1..5790: note = Description of Artificial Sequence: Synthetic polynucleotide
  source 1..5790: mol_type = other RNA
atgaaacggacagccgacggaagcgagttcgagtcaccaaagaagaagcggaaagtcgacaagaagtacagcatcggcctggacatcggcaccaactctgtgggctgggccgtgatcaccgacgagtacaaggtgcccagcaagaaattcaaggtgctgggcaacaccgaccggcacagcatcaagaagaacctgatcggagccctgctgttcgacagcggcgaaacagccgaggccacccggctgaagagaaccgccagaagaagatacaccagacggaagaaccggatctgctatctgcaagagatcttcagcaacgagatggccaaggtggacgacagcttcttccacagactggaagagtccttcctggtggaagaggataagaagcacgagcggcaccccatcttcggcaacatcgtggacgaggtggcctaccacgagaagtaccccaccatctaccacctgagaaagaaactggtggacagcaccgacaaggccgacctgcggctgatctatctggccctggcccacatgatcaagttccggggccacttcctgatcgagggcgacctgaaccccgacaacagcgacgtggacaagctgttcatccagctggtgcagacctacaaccagctgttcgaggaaaaccccatcaacgccagcggcgtggacgccaaggccatcctgtctgccagactgagcaagagcagacggctggaaaatctgatcgcccagctgcccggcgagaagaagaatggcctgttcggaaacctgattgccctgagcctgggcctgacccccaacttcaagagcaacttcgacctggccgaggatgccaaactgcagctgagcaaggacacctacgacgacgacctggacaacctgctggcccagatcggcgaccagtacgccgacctgtttctggccgccaagaacctgtccgacgccatcctgctgagcgacatcctgagagtgaacaccgagatcaccaaggcccccctgagcgcctctatgatcaagagatacgacgagcaccaccaggacctgaccctgctgaaagctctcgtgcggcagcagctgcctgagaagtacaaagagattttcttcgaccagagcaagaacggctacgccggctacattgacggcggagccagccaggaagagttctacaagttcatcaagcccatcctggaaaagatggacggcaccgaggaactgctcgtgaagctgaacagagaggacctgctgcggaagcagcggaccttcgacaacggcagcatcccccaccagatccacctgggagagctgcacgccattctgcggcggcaggaagatttttacccattcctgaaggacaaccgggaaaagatcgagaagatcctgaccttccgcatcccctactacgtgggccctctggccaggggaaacagcagattcgcctggatgaccagaaagagcgaggaaaccatcaccccctggaacttcgaggaagtggtggacaagggcgcttccgcccagagcttcatcgagcggatgaccaacttcgataagaacctgcccaacgagaaggtgctgcccaagcacagcctgctgtacgagtacttcaccgtgtataacgagctgaccaaagtgaaatacgtgaccgagggaatgagaaagcccgccttcctgagcggcgagcagaaaaaggccatcgtggacctgctgttcaagaccaaccggaaagtgaccgtgaagcagctgaaagaggactacttcaagaaaatcgagtgcttcgactccgtggaaatctccggcgtggaagatcggttcaacgcctccctgggcacataccacgatctgctgaaaattatcaaggacaaggacttcctggacaatgaggaaaacgaggacattctggaagatatcgtgctgaccctgacactgtttgaggacagagagatgatcgaggaacggctgaaaacctatgcccacctgttcgacgacaaagtgatgaagcagctgaagcggcggagatacaccggctggggcaggctgagccggaagctgatcaacggcatccgggacaagcagtccggcaagacaatcctggatttcctgaagtccgacggcttcgccaacagaaacttcatgcagctgatccacgacgacagcctgacctttaaagaggacatccagaaagcccaggtgtccggccagggcgatagcctgcacgagcacattgccaatctggccggcagccccgccattaagaagggcatcctgcagacagtgaaggtggtggacgagctcgtgaaagtgatgggccggcacaagcccgagaacatcgtgatcgaaatggccagagagaaccagaccacccagaagggacagaagaacagccgcgagagaatgaagcggatcgaagagggcatcaaagagctgggcagccagatcctgaaagaacaccccgtggaaaacacccagctgcagaacgagaagctgtacctgtactacctgcagaatgggcgggatatgtacgtggaccaggaactggacatcaaccggctgtccgactacgatgtggacgctatcgtgcctcagagctttctgaaggacgactccatcgacaacaaggtgctgaccagaagcgacaagaaccggggcaagagcgacaacgtgccctccgaagaggtcgtgaagaagatgaagaactactggcggcagctgctgaacgccaagctgattacccagagaaagttcgacaatctgaccaaggccgagagaggcggcctgagcgaactggataaggccggcttcatcaagagacagctggtggaaacccggcagatcacaaagcacgtggcacagatcctggactcccggatgaacactaagtacgacgagaatgacaagctgatccgggaagtgaaagtgatcaccctgaagtccaagctggtgtccgatttccggaaggatttccagttttacaaagtgcgcgagatcaacaactaccaccacgcccacgacgcctacctgaacgccgtcgtgggaaccgccctgatcaaaaagtaccctaagctggaaagcgagttcgtgtacggcgactacaaggtgtacgacgtgcggaagatgatcgccaagagcgagcaggaaatcggcaaggctaccgccaagtacttcttctacagcaacatcatgaactttttcaagaccgagattaccctggccaacggcgagatccggaagcggcctctgatcgagacaaacggcgaaaccggggagatcgtgtgggataagggccgggattttgccaccgtgcggaaagtgctgagcatgccccaagtgaatatcgtgaaaaagaccgaggtgcagacaggcggcttcagcaaagagtctatcctgcccaagaggaacagcgataagctgatcgccagaaagaaggactgggaccctaagaagtacggcggcttcgacagccccaccgtggcctattctgtgctggtggtggccaaagtggaaaagggcaagtccaagaaactgaagagtgtgaaagagctgctggggatcaccatcatggaaagaagcagcttcgagaagaatcccatcgactttctggaagccaagggctacaaagaagtgaaaaaggacctgatcatcaagctgcctaagtactccctgttcgagctggaaaacggccggaagagaatgctggcctctgccggcgaactgcagaagggaaacgaactggccctgccctccaaatatgtgaacttcctgtacctggccagccactatgagaagctgaagggctcccccgaggataatgagcagaaacagctgtttgtggaacagcacaagcactacctggacgagatcatcgagcagatcagcgagttctccaagagagtgatcctggccgacgctaatctggacaaagtgctgtccgcctacaacaagcaccgggataagcccatcagagagcaggccgagaatatcatccacctgtttaccctgaccaatctgggagcccctgccgccttcaagtactttgacaccaccatcgaccggaagaggtacaccagcaccaaagaggtgctggacgccaccctgatccaccagagcatcaccggcctgtacgagacacggatcgacctgtctcagctgggaggtgactccggcggctccagcggcggcagcagcggcagcgagacccccggcaccagcgagagcgccaccccagagagctccggcggcagcagcggcggcagcagcaccctgaacatcgaggacgagtacaggctgcacgagaccagcaaggagcccgacgtgagcctgggcagcacctggctgagcgatttccctcaggcttgggccgagaccggcggcatgggcctggccgtgcggcaggcccccctgattatccccctgaaggccaccagcacccccgtgagcatcaagcagtacccaatgtcccaggaggccaggctgggcatcaagcctcacatccagaggctgctggaccagggcatcctggtgccatgccagtccccctggaacacccctctgctgcccgtgaagaagcctggcaccaacgactaccggcccgtgcaggacctgagagaagtgaacaagcgggtggaggacatccacccaaccgtgcccaacccttacaacctgctgtccggcctgccccccagccaccagtggtacaccgtgctggacctgaaggacgccttcttctgcctgagactgcaccccacctctcagcccctgttcgccttcgagtggcgcgaccccgagatgggcatcagcggccagctgacctggaccagactgccacagggctttaagaatagcccaaccctgtttaacgaggccctgcacagggacctggccgacttcaggatccagcaccccgacctgattctgctgcagtacgtggacgacctgctgctggccgctaccagcgagctggactgccagcagggcaccagagccctgctgcagaccctgggcaacctgggctacagagccagcgccaagaaggcccagatctgtcagaagcaggtgaagtatctgggctacctgctgaaggaaggccagagatggctgaccgaggccagaaaggagactgtgatgggccagcccacccccaagacccccaggcagctgcgggagttcctgggcaaggccggcttttgcagactgtttatccctggcttcgccgagatggccgccccactgtaccctctgaccaagcctggcaccctgtttaactggggccccgaccagcagaaggcctaccaggagatcaagcaggccctgctgaccgcccccgccctgggcctgcccgacctgaccaagcctttcgagctgttcgtggacgagaagcagggatacgccaaaggcgtgctgacccagaagctgggcccctggcggaggcccgtggcctacctgagcaaaaaactggaccctgtggccgccggctggcccccatgcctgcggatggtggccgccatcgctgtgctgaccaaggacgccggcaagctgaccatgggccagcccctggtgatcctggcccctcacgccgtggaggctctggtgaagcagcctccagacaggtggctgtccaacgccaggatgacccactaccaggccctgctgctggacaccgaccgggtgcagttcggccctgtggtggccctgaaccccgccaccctgctgcctctgccagaggagggcctgcagcacaactgcctggacatcctggccgaggcccacggccccaagaagaagaggaaagtc

SEQ ID NO: 102 - DNA, 5712 bp, synthetic construct
  misc_feature 1..5712: note = Description of Artificial Sequence: Synthetic polynucleotide
  source 1..5712: mol_type = other DNA
gacaagaagtacagcatcggcctggacatcggcaccaactctgtgggctgggccgtgatcaccgacgagtacaaggtgcccagcaagaaattcaaggtgctgggcaacaccgaccggcacagcatcaagaagaacctgatcggagccctgctgttcgacagcggcgaaacagccgaggccacccggctgaagagaaccgccagaagaagatacaccagacggaagaaccggatctgctatctgcaagagatcttcagcaacgagatggccaaggtggacgacagcttcttccacagactggaagagtccttcctggtggaagaggataagaagcacgagcggcaccccatcttcggcaacatcgtggacgaggtggcctaccacgagaagtaccccaccatctaccacctgagaaagaaactggtggacagcaccgacaaggccgacctgcggctgatctatctggccctggcccacatgatcaagttccggggccacttcctgatcgagggcgacctgaaccccgacaacagcgacgtggacaagctgttcatccagctggtgcagacctacaaccagctgttcgaggaaaaccccatcaacgccagcggcgtggacgccaaggccatcctgtctgccagactgagcaagagcagacggctggaaaatctgatcgcccagctgcccggcgagaagaagaatggcctgttcggaaacctgattgccctgagcctgggcctgacccccaacttcaagagcaacttcgacctggccgaggatgccaaactgcagctgagcaaggacacctacgacgacgacctggacaacctgctggcccagatcggcgaccagtacgccgacctgtttctggccgccaagaacctgtccgacgccatcctgctgagcgacatcctgagagtgaacaccgagatcaccaaggcccccctgagcgcctctatgatcaagagatacgacgagcaccaccaggacctgaccctgctgaaagctctcgtgcggcagcagctgcctgagaagtacaaagagattttcttcgaccagagcaagaacggctacgccggctacattgacggcggagccagccaggaagagttctacaagttcatcaagcccatcctggaaaagatggacggcaccgaggaactgctcgtgaagctgaacagagaggacctgctgcggaagcagcggaccttcgacaacggcagcatcccccaccagatccacctgggagagctgcacgccattctgcggcggcaggaagatttttacccattcctgaaggacaaccgggaaaagatcgagaagatcctgaccttccgcatcccctactacgtgggccctctggccaggggaaacagcagattcgcctggatgaccagaaagagcgaggaaaccatcaccccctggaacttcgaggaagtggtggacaagggcgcttccgcccagagcttcatcgagcggatgaccaacttcgataagaacctgcccaacgagaaggtgctgcccaagcacagcctgctgtacgagtacttcaccgtgtataacgagctgaccaaagtgaaatacgtgaccgagggaatgagaaagcccgccttcctgagcggcgagcagaaaaaggccatcgtggacctgctgttcaagaccaaccggaaagtgaccgtgaagcagctgaaagaggactacttcaagaaaatcgagtgcttcgactccgtggaaatctccggcgtggaagatcggttcaacgcctccctgggcacataccacgatctgctgaaaattatcaaggacaaggacttcctggacaatgaggaaaacgaggacattctggaagatatcgtgctgaccctgacactgtttgaggacagagagatgatcgaggaacggctgaaaacctatgcccacctgttcgacgacaaagtgatgaagcagctgaagcggcggagatacaccggctggggcaggctgagccggaagctgatcaacggcatccgggacaagcagtccggcaagacaatcctggatttcctgaagtccgacggcttcgccaacagaaacttcatgcagctgatccacgacgacagcctgacctttaaagaggacatccagaaagcccaggtgtccggccagggcgatagcctgcacgagcacattgccaatctggccggcagccccgccattaagaagggcatcctgcagacagtgaaggtggtggacgagctcgtgaaagtgatgggccggcacaagcccgagaacatcgtgatcgaaatggccagagagaaccagaccacccagaagggacagaagaacagccgcgagagaatgaagcggatcgaagagggcatcaaagagctgggcagccagatcctgaaagaacaccccgtggaaaacacccagctgcagaacgagaagctgtacctgtactacctgcagaatgggcgggatatgtacgtggaccaggaactggacatcaaccggctgtccgactacgatgtggacgctatcgtgcctcagagctttctgaaggacgactccatcgacaacaaggtgctgaccagaagcgacaagaaccggggcaagagcgacaacgtgccctccgaagaggtcgtgaagaagatgaagaactactggcggcagctgctgaacgccaagctgattacccagagaaagttcgacaatctgaccaaggccgagagaggcggcctgagcgaactggataaggccggcttcatcaagagacagctggtggaaacccggcagatcacaaagcacgtggcacagatcctggactcccggatgaacactaagtacgacgagaatgacaagctgatccgggaagtgaaagtgatcaccctgaagtccaagctggtgtccgatttccggaaggatttccagttttacaaagtgcgcgagatcaacaactaccaccacgcccacgacgcctacctgaacgccgtcgtgggaaccgccctgatcaaaaagtaccctaagctggaaagcgagttcgtgtacggcgactacaaggtgtacgacgtgcggaagatgatcgccaagagcgagcaggaaatcggcaaggctaccgccaagtacttcttctacagcaacatcatgaactttttcaagaccgagattaccctggccaacggcgagatccggaagcggcctctgatcgagacaaacggcgaaaccggggagatcgtgtgggataagggccgggattttgccaccgtgcggaaagtgctgagcatgccccaagtgaatatcgtgaaaaagaccgaggtgcagacaggcggcttcagcaaagagtctatcctgcccaagaggaacagcgataagctgatcgccagaaagaaggactgggaccctaagaagtacggcggcttcgacagccccaccgtggcctattctgtgctggtggtggccaaagtggaaaagggcaagtccaagaaactgaagagtgtgaaagagctgctggggatcaccatcatggaaagaagcagcttcgagaagaatcccatcgactttctggaagccaagggctacaaagaagtgaaaaaggacctgatcatcaagctgcctaagtactccctgttcgagctggaaaacggccggaagagaatgctggcctctgccggcgaactgcagaagggaaacgaactggccctgccctccaaatatgtgaacttcctgtacctggccagccactatgagaagctgaagggctcccccgaggataatgagcagaaacagctgtttgtggaacagcacaagcactacctggacgagatcatcgagcagatcagcgagttctccaagagagtgatcctggccgacgctaatctggacaaagtgctgtccgcctacaacaagcaccgggataagcccatcagagagcaggccgagaatatcatccacctgtttaccctgaccaatctgggagcccctgccgccttcaagtactttgacaccaccatcgaccggaagaggtacaccagcaccaaagaggtgctggacgccaccctgatccaccagagcatcaccggcctgtacgagacacggatcgacctgtctcagctgggaggtgactccggcggctccagcggcggcagcagcggcagcgagacccccggcaccagcgagagcgccaccccagagagctccggcggcagcagcggcggcagcagcaccctgaacatcgaggacgagtacaggctgcacgagaccagcaaggagcccgacgtgagcctgggcagcacctggctgagcgatttccctcaggcttgggccgagaccggcggcatgggcctggccgtgcggcaggcccccctgattatccccctgaaggccaccagcacccccgtgagcatcaagcagtacccaatgtcccaggaggccaggctgggcatcaagcctcacatccagaggctgctggaccagggcatcctggtgccatgccagtccccctggaacacccctctgctgcccgtgaagaagcctggcaccaacgactaccggcccgtgcaggacctgagagaagtgaacaagcgggtggaggacatccacccaaccgtgcccaacccttacaacctgctgtccggcctgccccccagccaccagtggtacaccgtgctggacctgaaggacgccttcttctgcctgagactgcaccccacctctcagcccctgttcgccttcgagtggcgcgaccccgagatgggcatcagcggccagctgacctggaccagactgccacagggctttaagaatagcccaaccctgtttaacgaggccctgcacagggacctggccgacttcaggatccagcaccccgacctgattctgctgcagtacgtggacgacctgctgctggccgctaccagcgagctggactgccagcagggcaccagagccctgctgcagaccctgggcaacctgggctacagagccagcgccaagaaggcccagatctgtcagaagcaggtgaagtatctgggctacctgctgaaggaaggccagagatggctgaccgaggccagaaaggagactgtgatgggccagcccacccccaagacccccaggcagctgcgggagttcctgggcaaggccggcttttgcagactgtttatccctggcttcgccgagatggccgccccactgtaccctctgaccaagcctggcaccctgtttaactggggccccgaccagcagaaggcctaccaggagatcaagcaggccctgctgaccgcccccgccctgggcctgcccgacctgaccaagcctttcgagctgttcgtggacgagaagcagggatacgccaaaggcgtgctgacccagaagctgggcccctggcggaggcccgtggcctacctgagcaaaaaactggaccctgtggccgccggctggcccccatgcctgcggatggtggccgccatcgctgtgctgaccaaggacgccggcaagctgaccatgggccagcccctggtgatcctggcccctcacgccgtggaggctctggtgaagcagcctccagacaggtggctgtccaacgccaggatgacccactaccaggccctgctgctggacaccgaccgggtgcagttcggccctgtggtggccctgaaccccgccaccctgctgcctctgccagaggagggcctgcagcacaactgcctggacatcctggccgaggcccacggc

SEQ ID NO: 103 - RNA, 5712 nt, synthetic construct
  misc_feature 1..5712: note = Description of Artificial Sequence: Synthetic polynucleotide
  source 1..5712: mol_type = other RNA
gacaagaagtacagcatcggcctggacatcggcaccaactctgtgggctgggccgtgatcaccgacgagtacaaggtgcccagcaagaaattcaaggtgctgggcaacaccgaccggcacagcatcaagaagaacctgatcggagccctgctgttcgacagcggcgaaacagccgaggccacccggctgaagagaaccgccagaagaagatacaccagacggaagaaccggatctgctatctgcaagagatcttcagcaacgagatggccaaggtggacgacagcttcttccacagactggaagagtccttcctggtggaagaggataagaagcacgagcggcaccccatcttcggcaacatcgtggacgaggtggcctaccacgagaagtaccccaccatctaccacctgagaaagaaactggtggacagcaccgacaaggccgacctgcggctgatctatctggccctggcccacatgatcaagttccggggccacttcctgatcgagggcgacctgaaccccgacaacagcgacgtggacaagctgttcatccagctggtgcagacctacaaccagctgttcgaggaaaaccccatcaacgccagcggcgtggacgccaaggccatcctgtctgccagactgagcaagagcagacggctggaaaatctgatcgcccagctgcccggcgagaagaagaatggcctgttcggaaacctgattgccctgagcctgggcctgacccccaacttcaagagcaacttcgacctggccgaggatgccaaactgcagctgagcaaggacacctacgacgacgacctggacaacctgctggcccagatcggcgaccagtacgccgacctgtttctggccgccaagaacctgtccgacgccatcctgctgagcgacatcctgagagtgaacaccgagatcaccaaggcccccctgagcgcctctatgatcaagagatacgacgagcaccaccaggacctgaccctgctgaaagctctcgtgcggcagcagctgcctgagaagtacaaagagattttcttcgaccagagcaagaacggctacgccggctacattgacggcggagccagccaggaagagttctacaagttcatcaagcccatcctggaaaagatggacggcaccgaggaactgctcgtgaagctgaacagagaggacctgctgcggaagcagcggaccttcgacaacggcagcatcccccaccagatccacctgggagagctgcacgccattctgcggcggcaggaagatttttacccattcctgaaggacaaccgggaaaagatcgagaagatcctgaccttccgcatcccctactacgtgggccctctggccaggggaaacagcagattcgcctggatgaccagaaagagcgaggaaaccatcaccccctggaacttcgaggaagtggtggacaagggcgcttccgcccagagcttcatcgagcggatgaccaacttcgataagaacctgcccaacgagaaggtgctgcccaagcacagcctgctgtacgagtacttcaccgtgtataacgagctgaccaaagtgaaatacgtgaccgagggaatgagaaagcccgccttcctgagcggcgagcagaaaaaggccatcgtggacctgctgttcaagaccaaccggaaagtgaccgtgaagcagctgaaagaggactacttcaagaaaatcgagtgcttcgactccgtggaaatctccggcgtggaagatcggttcaacgcctccctgggcacataccacgatctgctgaaaattatcaaggacaaggacttcctggacaatgaggaaaacgaggacattctggaagatatcgtgctgaccctgacactgtttgaggacagagagatgatcgaggaacggctgaaaacctatgcccacctgttcgacgacaaagtgatgaagcagctgaagcggcggagatacaccggctggggcaggctgagccggaagctgatcaacggcatccgggacaagcagtccggcaagacaatcctggatttcctgaagtccgacggcttcgccaacagaaacttcatgcagctgatccacgacgacagcctgacctttaaagaggacatccagaaagcccaggtgtccggccagggcgatagcctgcacgagcacattgccaatctggccggcagccccgccattaagaagggcatcctgcagacagtgaaggtggtggacgagctcgtgaaagtgatgggccggcacaagcccgagaacatcgtgatcgaaatggccagagagaaccagaccacccagaagggacagaagaacagccgcgagagaatgaagcggatcgaagagggcatcaaagagctgggcagccagatcctgaaagaacaccccgtggaaaacacccagctgcagaacgagaagctgtacctgtactacctgcagaatgggcgggatatgtacgtggaccaggaactggacatcaaccggctgtccgactacgatgtggacgctatcgtgcctcagagctttctgaaggacgactccatcgacaacaaggtgctgaccagaagcgacaagaaccggggcaagagcgacaacgtgccctccgaagaggtcgtgaagaagatgaagaactactggcggcagctgctgaacgccaagctgattacccagagaaagttcgacaatctgaccaaggccgagagaggcggcctgagcgaactggataaggccggcttcatcaagagacagctggtggaaacccggcagatcacaaagcacgtggcacagatcctggactcccggatgaacactaagtacgacgagaatgacaagctgatccgggaagtgaaagtgatcaccctgaagtccaagctggtgtccgatttccggaaggatttccagttttacaaagtgcgcgagatcaacaactaccaccacgcccacgacgcctacctgaacgccgtcgtgggaaccgccctgatcaaaaagtaccctaagctggaaagcgagttcgtgtacggcgactacaaggtgtacgacgtgcggaagatgatcgccaagagcgagcaggaaatcggcaaggctaccgccaagtacttcttctacagcaacatcatgaactttttcaagaccgagattaccctggccaacggcgagatccggaagcggcctctgatcgagacaaacggcgaaaccggggagatcgtgtgggataagggccgggattttgccaccgtgcggaaagtgctgagcatgccccaagtgaatatcgtgaaaaagaccgaggtgcagacaggcggcttcagcaaagagtctatcctgcccaagaggaacagcgataagctgatcgccagaaagaaggactgggaccctaagaagtacggcggcttcgacagccccaccgtggcctattctgtgctggtggtggccaaagtggaaaagggcaagtccaagaaactgaagagtgtgaaagagctgctggggatcaccatcatggaaagaagcagcttcgagaagaatcccatcgactttctggaagccaagggctacaaagaagtgaaaaaggacctgatcatcaagctgcctaagtactccctgttcgagctggaaaacggccggaagagaatgctggcctctgccggcgaactgcagaagggaaacgaactggccctgccctccaaatatgtgaacttcctgtacctggccagccactatgagaagctgaagggctcccccgaggataatgagcagaaacagctgtttgtggaacagcacaagcactacctggacgagatcatcgagcagatcagcgagttctccaagagagtgatcctggccgacgctaatctggacaaagtgctgtccgcctacaacaagcaccgggataagcccatcagagagcaggccgagaatatcatccacctgtttaccctgaccaatctgggagcccctgccgccttcaagtactttgacaccaccatcgaccggaagaggtacaccagcaccaaagaggtgctggacgccaccctgatccaccagagcatcaccggcctgtacgagacacggatcgacctgtctcagctgggaggtgactccggcggctccagcggcggcagcagcggcagcgagacccccggcaccagcgagagcgccaccccagagagctccggcggcagcagcggcggcagcagcaccctgaacatcgaggacgagtacaggctgcacgagaccagcaaggagcccgacgtgagcctgggcagcacctggctgagcgatttccctcaggcttgggccgagaccggcggcatgggcctggccgtgcggcaggcccccctgattatccccctgaaggccaccagcacccccgtgagcatcaagcagtacccaatgtcccaggaggccaggctgggcatcaagcctcacatccagaggctgctggaccagggcatcctggtgccatgccagtccccctggaacacccctctgctgcccgtgaagaagcctggcaccaacgactaccggcccgtgcaggacctgagagaagtgaacaagcgggtggaggacatccacccaaccgtgcccaacccttacaacctgctgtccggcctgccccccagccaccagtggtacaccgtgctggacctgaaggacgccttcttctgcctgagactgcaccccacctctcagcccctgttcgccttcgagtggcgcgaccccgagatgggcatcagcggccagctgacctggaccagactgccacagggctttaagaatagcccaaccctgtttaacgaggccctgcacagggacctggccgacttcaggatccagcaccccgacctgattctgctgcagtacgtggacgacctgctgctggccgctaccagcgagctggactgccagcagggcaccagagccctgctgcagaccctgggcaacctgggctacagagccagcgccaagaaggcccagatctgtcagaagcaggtgaagtatctgggctacctgctgaaggaaggccagagatggctgaccgaggccagaaaggagactgtgatgggccagcccacccccaagacccccaggcagctgcgggagttcctgggcaaggccggcttttgcagactgtttatccctggcttcgccgagatggccgccccactgtaccctctgaccaagcctggcaccctgtttaactggggccccgaccagcagaaggcctaccaggagatcaagcaggccctgctgaccgcccccgccctgggcctgcccgacctgaccaagcctttcgagctgttcgtggacgagaagcagggatacgccaaaggcgtgctgacccagaagctgggcccctggcggaggcccgtggcctacctgagcaaaaaactggaccctgtggccgccggctggcccccatgcctgcggatggtggccgccatcgctgtgctgaccaaggacgccggcaagctgaccatgggccagcccctggtgatcctggcccctcacgccgtggaggctctggtgaagcagcctccagacaggtggctgtccaacgccaggatgacccactaccaggccctgctgctggacaccgaccgggtgcagttcggccctgtggtggccctgaaccccgccaccctgctgcctctgccagaggagggcctgcagcacaactgcctggacatcctggccgaggcccacggc

SEQ ID NO: 104 - protein, 2112 aa, synthetic construct
  REGION 1..2112: note = Description of Artificial Sequence: Synthetic polypeptide
MKRTADGSEFESPKKKRKVDKKYSIGLDIGTNSVGWAVITDEYKVPSKKFKVLGNTDRHSIKKNLIGALLFDSGETAEATRLKRTARRRYTRRKNRICYLQEIFSNEMAKVDDSFFHRLEESFLVEEDKKHERHPIFGNIVDEVAYHEKYPTIYHLRKKLVDSTDKADLRLIYLALAHMIKFRGHFLIEGDLNPDNSDVDKLFIQLVQTYNQLFEENPINASGVDAKAILSARLSKSRRLENLIAQLPGEKKNGLFGNLIALSLGLTPNFKSNFDLAEDAKLQLSKDTYDDDLDNLLAQIGDQYADLFLAAKNLSDAILLSDILRVNTEITKAPLSASMIKRYDEHHQDLTLLKALVRQQLPEKYKEIFFDQSKNGYAGYIDGGASQEEFYKFIKPILEKMDGTEELLVKLNREDLLRKQRTFDNGSIPHQIHLGELHAILRRQEDFYPFLKDNREKIEKILTFRIPYYVGPLARGNSRFAWMTRKSEETITPWNFEEVVDKGASAQSFIERMTNFDKNLPNEKVLPKHSLLYEYFTVYNELTKVKYVTEGMRKPAFLSGEQKKAIVDLLFKTNRKVTVKQLKEDYFKKIECFDSVEISGVEDRFNASLGTYHDLLKIIKDKDFLDNEENEDILEDIVLTLTLFEDREMIEERLKTYAHLFDDKVMKQLKRRRYTGWGRLSRKLINGIRDKQSGKTILDFLKSDGFANRNFMQLIHDDSLTFKEDIQKAQVSGQGDSLHEHIANLAGSPAIKKGILQTVKVVDELVKVMGRHKPENIVIEMARENQTTQKGQKNSRERMKRIEEGIKELGSQILKEHPVENTQLQNEKLYLYYLQNGRDMYVDQELDINRLSDYDVDAIVPQSFLKDDSIDNKVLTRSDKNRGKSDNVPSEEVVKKMKNYWRQLLNAKLITQRKFDNLTKAERGGLSELDKAGFIKRQLVETRQITKHVAQILDSRMNTKYDENDKLIREVKVITLKSKLVSDFRKDFQFYKVREINNYHHAHDAYLNAVVGTALIKKYPKLESEFVYGDYKVYDVRKMIAKSEQEIGKATAKYFFYSNIMNFFKTEITLANGEIRKRPLIETNGETGEIVWDKGRDFATVRKVLSMPQVNIVKKTEVQTGGFSKESILPKRNSDKLIARKKDWDPKKYGGFDSPTVAYSVLVVAKVEKGKSKKLKSVKELLGITIMERSSFEKNPIDFLEAKGYKEVKKDLIIKLPKYSLFELENGRKRMLASAGELQKGNELALPSKYVNFLYLASHYEKLKGSPEDNEQKQLFVEQHKHYLDEIIEQISEFSKRVILADANLDKVLSAYNKHRDKPIREQAENIIHLFTLTNLGAPAAFKYFDTTIDRKRYTSTKEVLDATLIHQSITGLYETRIDLSQLGGDSGGSEAAAKEAAAKEAAAKEAAAKSGGSTLNIEDEYRLHETSKEPDVSLGSTWLSDFPQAWAETGGMGLAVRQAPLIIPLKATSTPVSIKQYPMSQEARLGIKPHIQRLLDQGILVPCQSPWNTPLLPVKKPGTNDYRPVQDLREVNKRVEDIHPTVPNPYNLLSGLPPSHQWYTVLDLKDAFFCLRLHPTSQPLFAFEWRDPEMGISGQLTWTRLPQGFKNSPTLFNEALHRDLADFRIQHPDLILLQYVDDLLLAATSELDCQQGTRALLQTLGNLGYRASAKKAQICQKQVKYLGYLLKEGQRWLTEARKETVMGQPTPKTPRQLREFLGKAGFCRLFIPGFAEMAAPLYPLTKPGTLFNWGPDQQKAYQEIKQALLTAPALGLPDLTKPFELFVDEKQGYAKGVLTQKLGPWRRPVAYLSKKLDPVAAGWPPCLRMVAAIAVLTKDAGKLTMGQPLVILAPHAVEALVKQPPDRWLSNARMTHYQALLLDTDRVQFGPVVALNPATLLPLPEEGLQHNCLDILAEAHGTRPDLTDQPLPDADHTWYTDGSSLLQEGQRKAGAAVTTETEVIWAKALPAGTSAQRAELIALTQALKMAEGKKLNVYTDSRYAFATAHIHGEIYRRRGWLTSEGKEIKNKDEILALLKALFLPKRLSIIHCPGHQKGHSAEARGNRMADQAARKAAITETPDTSTLLIENSSPSGGSKRTADGSEFEPKKKRKV

SEQ ID NO: 105 - protein, 2072 aa, synthetic construct
  REGION 1..2072: note = Description of Artificial Sequence: Synthetic polypeptide
DKKYSIGLDIGTNSVGWAVITDEYKVPSKKFKVLGNTDRHSIKKNLIGALLFDSGETAEATRLKRTARRRYTRRKNRICYLQEIFSNEMAKVDDSFFHRLEESFLVEEDKKHERHPIFGNIVDEVAYHEKYPTIYHLRKKLVDSTDKADLRLIYLALAHMIKFRGHFLIEGDLNPDNSDVDKLFIQLVQTYNQLFEENPINASGVDAKAILSARLSKSRRLENLIAQLPGEKKNGLFGNLIALSLGLTPNFKSNFDLAEDAKLQLSKDTYDDDLDNLLAQIGDQYADLFLAAKNLSDAILLSDILRVNTEITKAPLSASMIKRYDEHHQDLTLLKALVRQQLPEKYKEIFFDQSKNGYAGYIDGGASQEEFYKFIKPILEKMDGTEELLVKLNREDLLRKQRTFDNGSIPHQIHLGELHAILRRQEDFYPFLKDNREKIEKILTFRIPYYVGPLARGNSRFAWMTRKSEETITPWNFEEVVDKGASAQSFIERMTNFDKNLPNEKVLPKHSLLYEYFTVYNELTKVKYVTEGMRKPAFLSGEQKKAIVDLLFKTNRKVTVKQLKEDYFKKIECFDSVEISGVEDRFNASLGTYHDLLKIIKDKDFLDNEENEDILEDIVLTLTLFEDREMIEERLKTYAHLFDDKVMKQLKRRRYTGWGRLSRKLINGIRDKQSGKTILDFLKSDGFANRNFMQLIHDDSLTFKEDIQKAQVSGQGDSLHEHIANLAGSPAIKKGILQTVKVVDELVKVMGRHKPENIVIEMARENQTTQKGQKNSRERMKRIEEGIKELGSQILKEHPVENTQLQNEKLYLYYLQNGRDMYVDQELDINRLSDYDVDAIVPQSFLKDDSIDNKVLTRSDKNRGKSDNVPSEEVVKKMKNYWRQLLNAKLITQRKFDNLTKAERGGLSELDKAGFIKRQLVETRQITKHVAQILDSRMNTKYDENDKLIREVKVITLKSKLVSDFRKDFQFYKVREINNYHHAHDAYLNAVVGTALIKKYPKLESEFVYGDYKVYDVRKMIAKSEQEIGKATAKYFFYSNIMNFFKTEITLANGEIRKRPLIETNGETGEIVWDKGRDFATVRKVLSMPQVNIVKKTEVQTGGFSKESILPKRNSDKLIARKKDWDPKKYGGFDSPTVAYSVLVVAKVEKGKSKKLKSVKELLGITIMERSSFEKNPIDFLEAKGYKEVKKDLIIKLPKYSLFELENGRKRMLASAGELQKGNELALPSKYVNFLYLASHYEKLKGSPEDNEQKQLFVEQHKHYLDEIIEQISEFSKRVILADANLDKVLSAYNKHRDKPIREQAENIIHLFTLTNLGAPAAFKYFDTTIDRKRYTSTKEVLDATLIHQSITGLYETRIDLSQLGGDSGGSEAAAKEAAAKEAAAKEAAAKSGGSTLNIEDEYRLHETSKEPDVSLGSTWLSDFPQAWAETGGMGLAVRQAPLIIPLKATSTPVSIKQYPMSQEARLGIKPHIQRLLDQGILVPCQSPWNTPLLPVKKPGTNDYRPVQDLREVNKRVEDIHPTVPNPYNLLSGLPPSHQWYTVLDLKDAFFCLRLHPTSQPLFAFEWRDPEMGISGQLTWTRLPQGFKNSPTLFNEALHRDLADFRIQHPDLILLQYVDDLLLAATSELDCQQGTRALLQTLGNLGYRASAKKAQICQKQVKYLGYLLKEGQRWLTEARKETVMGQPTPKTPRQLREFLGKAGFCRLFIPGFAEMAAPLYPLTKPGTLFNWGPDQQKAYQEIKQALLTAPALGLPDLTKPFELFVDEKQGYAKGVLTQKLGPWRRPVAYLSKKLDPVAAGWPPCLRMVAAIAVLTKDAGKLTMGQPLVILAPHAVEALVKQPPDRWLSNARMTHYQALLLDTDRVQFGPVVALNPATLLPLPEEGLQHNCLDILAEAHGTRPDLTDQPLPDADHTWYTDGSSLLQEGQRKAGAAVTTETEVIWAKALPAGTSAQRAELIALTQALKMAEGKKLNVYTDSRYAFATAHIHGEIYRRRGWLTSEGKEIKNKDEILALLKALFLPKRLSIIHCPGHQKGHSAEARGNRMADQAARKAAITETPDTSTLLIENSSP

SEQ ID NO: 106 - DNA, 6336 bp, synthetic construct
  misc_feature 1..6336: note = Description of Artificial Sequence: Synthetic polynucleotide
  source 1..6336: mol_type = other DNA
atgaaacggacagccgacggaagcgagttcgagtcaccaaagaagaagcggaaagtcgacaagaagtacagcatcggcctggacatcggcaccaactctgtgggctgggccgtgatcaccgacgagtacaaggtgcccagcaagaaattcaaggtgctgggcaacaccgaccggcacagcatcaagaagaacctgatcggagccctgctgttcgacagcggcgaaacagccgaggccacccggctgaagagaaccgccagaagaagatacaccagacggaagaaccggatctgctatctgcaagagatcttcagcaacgagatggccaaggtggacgacagcttcttccacagactggaagagtccttcctggtggaagaggataagaagcacgagcggcaccccatcttcggcaacatcgtggacgaggtggcctaccacgagaagtaccccaccatctaccacctgagaaagaaactggtggacagcaccgacaaggccgacctgcggctgatctatctggccctggcccacatgatcaagttccggggccacttcctgatcgagggcgacctgaaccccgacaacagcgacgtggacaagctgttcatccagctggtgcagacctacaaccagctgttcgaggaaaaccccatcaacgccagcggcgtggacgccaaggccatcctgtctgccagactgagcaagagcagacggctggaaaatctgatcgcccagctgcccggcgagaagaagaatggcctgttcggaaacctgattgccctgagcctgggcctgacccccaacttcaagagcaacttcgacctggccgaggatgccaaactgcagctgagcaaggacacctacgacgacgacctggacaacctgctggcccagatcggcgaccagtacgccgacctgtttctggccgccaagaacctgtccgacgccatcctgctgagcgacatcctgagagtgaacaccgagatcaccaaggcccccctgagcgcctctatgatcaagagatacgacgagcaccaccaggacctgaccctgctgaaagctctcgtgcggcagcagctgcctgagaagtacaaagagattttcttcgaccagagcaagaacggctacgccggctacattgacggcggagccagccaggaagagttctacaagttcatcaagcccatcctggaaaagatggacggcaccgaggaactgctcgtgaagctgaacagagaggacctgctgcggaagcagcggaccttcgacaacggcagcatcccccaccagatccacctgggagagctgcacgccattctgcggcggcaggaagatttttacccattcctgaaggacaaccgggaaaagatcgagaagatcctgaccttccgcatcccctactacgtgggccctctggccaggggaaacagcagattcgcctggatgaccagaaagagcgaggaaaccatcaccccctggaacttcgaggaagtggtggacaagggcgcttccgcccagagcttcatcgagcggatgaccaacttcgataagaacctgcccaacgagaaggtgctgcccaagcacagcctgctgtacgagtacttcaccgtgtataacgagctgaccaaagtgaaatacgtgaccgagggaatgagaaagcccgccttcctgagcggcgagcagaaaaaggccatcgtggacctgctgttcaagaccaaccggaaagtgaccgtgaagcagctgaaagaggactacttcaagaaaatcgagtgcttcgactccgtggaaatctccggcgtggaagatcggttcaacgcctccctgggcacataccacgatctgctgaaaattatcaaggacaaggacttcctggacaatgaggaaaacgaggacattctggaagatatcgtgctgaccctgacactgtttgaggacagagagatgatcgaggaacggctgaaaacctatgcccacctgttcgacgacaaagtgatgaagcagctgaagcggcggagatacaccggctggggcaggctgagccggaagctgatcaacggcatccgggacaagcagtccggcaagacaatcctggatttcctgaagtccgacggcttcgccaacagaaacttcatgcagctgatccacgacgacagcctgacctttaaagaggacatccagaaagcccaggtgtccggccagggcgatagcctgcacgagcacattgccaatctggccggcagccccgccattaagaagggcatcctgcagacagtgaaggtggtggacgagctcgtgaaagtgatgggccggcacaagcccgagaacatcgtgatcgaaatggccagagagaaccagaccacccagaagggacagaagaacagccgcgagagaatgaagcggatcgaagagggcatcaaagagctgggcagccagatcctgaaagaacaccccgtggaaaacacccagctgcagaacgagaagctgtacctgtactacctgcagaatgggcgggatatgtacgtggaccaggaactggacatcaaccggctgtccgactacgatgtggacgctatcgtgcctcagagctttctgaaggacgactccatcgacaacaaggtgctgaccagaagcgacaagaaccggggcaagagcgacaacgtgccctccgaagaggtcgtgaagaagatgaagaactactggcggcagctgctgaacgccaagctgattacccagagaaagttcgacaatctgaccaaggccgagagaggcggcctgagcgaactggataaggccggcttcatcaagagacagctggtggaaacccggcagatcacaaagcacgtggcacagatcctggactcccggatgaacactaagtacgacgagaatgacaagctgatccgggaagtgaaagtgatcaccctgaagtccaagctggtgtccgatttccggaaggatttccagttttacaaagtgcgcgagatcaacaactaccaccacgcccacgacgcctacctgaacgccgtcgtgggaaccgccctgatcaaaaagtaccctaagctggaaagcgagttcgtgtacggcgactacaaggtgtacgacgtgcggaagatgatcgccaagagcgagcaggaaatcggcaaggctaccgccaagtacttcttctacagcaacatcatgaactttttcaagaccgagattaccctggccaacggcgagatccggaagcggcctctgatcgagacaaacggcgaaaccggggagatcgtgtgggataagggccgggattttgccaccgtgcggaaagtgctgagcatgccccaagtgaatatcgtgaaaaagaccgaggtgcagacaggcggcttcagcaaagagtctatcctgcccaagaggaacagcgataagctgatcgccagaaagaaggactgggaccctaagaagtacggcggcttcgacagccccaccgtggcctattctgtgctggtggtggccaaagtggaaaagggcaagtccaagaaactgaagagtgtgaaagagctgctggggatcaccatcatggaaagaagcagcttcgagaagaatcccatcgactttctggaagccaagggctacaaagaagtgaaaaaggacctgatcatcaagctgcctaagtactccctgttcgagctggaaaacggccggaagagaatgctggcctctgccggcgaactgcagaagggaaacgaactggccctgccctccaaatatgtgaacttcctgtacctggccagccactatgagaagctgaagggctcccccgaggataatgagcagaaacagctgtttgtggaacagcacaagcactacctggacgagatcatcgagcagatcagcgagttctccaagagagtgatcctggccgacgctaatctggacaaagtgctgtccgcctacaacaagcaccgggataagcccatcagagagcaggccgagaatatcatccacctgtttaccctgaccaatctgggagcccctgccgccttcaagtactttgacaccaccatcgaccggaagaggtacaccagcaccaaagaggtgctggacgccaccctgatccaccagagcatcaccggcctgtacgagacacggatcgacctgtctcagctgggaggtgactccggcggcagcgaggccgccgccaaggaagccgccgccaaggaagccgctgccaaggaggccgctgctaaaagcggcggatctaccctgaacatcgaggacgagtacaggctgcacgagaccagcaaggagcccgacgtgagcctgggcagcacctggctgagcgatttccctcaggcttgggccgagaccggcggcatgggcctggccgtgcggcaggcccccctgattatccccctgaaggccaccagcacccccgtgagcatcaagcagtacccaatgtcccaggaggccaggctgggcatcaagcctcacatccagaggctgctggaccagggcatcctggtgccatgccagtccccctggaacacccctctgctgcccgtgaagaagcctggcaccaacgactaccggcccgtgcaggacctgagagaagtgaacaagcgggtggaggacatccacccaaccgtgcccaacccttacaacctgctgtccggcctgccccccagccaccagtggtacaccgtgctggacctgaaggacgccttcttctgcctgagactgcaccccacctctcagcccctgttcgccttcgagtggcgcgaccccgagatgggcatcagcggccagctgacctggaccagactgccacagggctttaagaatagcccaaccctgtttaacgaggccctgcacagggacctggccgacttcaggatccagcaccccgacctgattctgctgcagtacgtggacgacctgctgctggccgctaccagcgagctggactgccagcagggcaccagagccctgctgcagaccctgggcaacctgggctacagagccagcgccaagaaggcccagatctgtcagaagcaggtgaagtatctgggctacctgctgaaggaaggccagagatggctgaccgaggccagaaaggagactgtgatgggccagcccacccccaagacccccaggcagctgcgggagttcctgggcaaggccggcttttgcagactgtttatccctggcttcgccgagatggccgccccactgtaccctctgaccaagcctggcaccctgtttaactggggccccgaccagcagaaggcctaccaggagatcaagcaggccctgctgaccgcccccgccctgggcctgcccgacctgaccaagcctttcgagctgttcgtggacgagaagcagggatacgccaaaggcgtgctgacccagaagctgggcccctggcggaggcccgtggcctacctgagcaaaaaactggaccctgtggccgccggctggcccccatgcctgcggatggtggccgccatcgctgtgctgaccaaggacgccggcaagctgaccatgggccagcccctggtgatcctggcccctcacgccgtggaggctctggtgaagcagcctccagacaggtggctgtccaacgccaggatgacccactaccaggccctgctgctggacaccgaccgggtgcagttcggccctgtggtggccctgaaccccgccaccctgctgcctctgccagaggagggcctgcagcacaactgcctggacatcctggccgaggcccacggcaccaggcccgacctgaccgaccagcccctgcctgacgccgaccacacctggtacaccgacggcagctccctgctgcaggagggccagaggaaggccggcgccgccgtgaccaccgagaccgaggtgatctgggccaaagccctgcctgccggcacctccgcccagcgggccgagctgatcgccctgacccaggccctgaagatggctgagggcaagaagctgaacgtgtacaccgattccagatacgccttcgccaccgcccacatccacggcgagatctacagaagaaggggctggctgacctccgagggcaaggagatcaagaacaaggacgagattctggccctgctgaaggccctgttcctgcctaagagactgagcatcatccactgtcccggccaccagaagggccacagcgccgaggccagaggcaatagaatggccgaccaggccgccagaaaggccgccatcaccgagacccccgacaccagcaccctgctgatcgagaacagcagccccagcggcggctccaaacgcaccgccgacgggagcgagttcgagcccaagaagaagaggaaagtc

SEQ ID NO: 107 - RNA, 6336 nt, synthetic construct
  misc_feature 1..6336: note = Description of Artificial Sequence: Synthetic polynucleotide
  source 1..6336: mol_type = other RNA
atgaaacggacagccgacggaagcgagttcgagtcaccaaagaagaagcggaaagtcgacaagaagtacagcatcggcctggacatcggcaccaactctgtgggctgggccgtgatcaccgacgagtacaaggtgcccagcaagaaattcaaggtgctgggcaacaccgaccggcacagcatcaagaagaacctgatcggagccctgctgttcgacagcggcgaaacagccgaggccacccggctgaagagaaccgccagaagaagatacaccagacggaagaaccggatctgctatctgcaagagatcttcagcaacgagatggccaaggtggacgacagcttcttccacagactggaagagtccttcctggtggaagaggataagaagcacgagcggcaccccatcttcggcaacatcgtggacgaggtggcctaccacgagaagtaccccaccatctaccacctgagaaagaaactggtggacagcaccgacaaggccgacctgcggctgatctatctggccctggcccacatgatcaagttccggggccacttcctgatcgagggcgacctgaaccccgacaacagcgacgtggacaagctgttcatccagctggtgcagacctacaaccagctgttcgaggaaaaccccatcaacgccagcggcgtggacgccaaggccatcctgtctgccagactgagcaagagcagacggctggaaaatctgatcgcccagctgcccggcgagaagaagaatggcctgttcggaaacctgattgccctgagcctgggcctgacccccaacttcaagagcaacttcgacctggccgaggatgccaaactgcagctgagcaaggacacctacgacgacgacctggacaacctgctggcccagatcggcgaccagtacgccgacctgtttctggccgccaagaacctgtccgacgccatcctgctgagcgacatcctgagagtgaacaccgagatcaccaaggcccccctgagcgcctctatgatcaagagatacgacgagcaccaccaggacctgaccctgctgaaagctctcgtgcggcagcagctgcctgagaagtacaaagagattttcttcgaccagagcaagaacggctacgccggctacattgacggcggagccagccaggaagagttctacaagttcatcaagcccatcctggaaaagatggacggcaccgaggaactgctcgtgaagctgaacagagaggacctgctgcggaagcagcggaccttcgacaacggcagcatcccccaccagatccacctgggagagctgcacgccattctgcggcggcaggaagatttttacccattcctgaaggacaaccgggaaaagatcgagaagatcctgaccttccgcatcccctactacgtgggccctctggccaggggaaacagcagattcgcctggatgaccagaaagagcgaggaaaccatcaccccctggaacttcgaggaagtggtggacaagggcgcttccgcccagagcttcatcgagcggatgaccaacttcgataagaacctgcccaacgagaaggtgctgcccaagcacagcctgctgtacgagtacttcaccgtgtataacgagctgaccaaagtgaaatacgtgaccgagggaatgagaaagcccgccttcctgagcggcgagcagaaaaaggccatcgtggacctgctgttcaagaccaaccggaaagtgaccgtgaagcagctgaaagaggactacttcaagaaaatcgagtgcttcgactccgtggaaatctccggcgtggaagatcggttcaacgcctccctgggcacataccacgatctgctgaaaattatcaaggacaaggacttcctggacaatgaggaaaacgaggacattctggaagatatcgtgctgaccctgacactgtttgaggacagagagatgatcgaggaacggctgaaaacctatgcccacctgttcgacgacaaagtgatgaagcagctgaagcggcggagatacaccggctggggcaggctgagccggaagctgatcaacggcatccgggacaagcagtccggcaagacaatcctggatttcctgaagtccgacggcttcgccaacagaaacttcatgcagctgatccacgacgacagcctgacctttaaagaggacatccagaaagcccaggtgtccggccagggcgatagcctgcacgagcacattgccaatctggccggcagccccgccattaagaagggcatcctgcagacagtgaaggtggtggacgagctcgtgaaagtgatgggccggcacaagcccgagaacatcgtgatcgaaatggccagagagaaccagaccacccagaagggacagaagaacagccgcgagagaatgaagcggatcgaagagggcatcaaagagctgggcagccagatcctgaaagaacaccccgtggaaaacacccagctgcagaacgagaagctgtacctgtactacctgcagaatgggcgggatatgtacgtggaccaggaactggacatcaaccggctgtccgactacgatgtggacgctatcgtgcctcagagctttctgaaggacgactccatcgacaacaaggtgctgaccagaagcgacaagaaccggggcaagagcgacaacgtgccctccgaagaggtcgtgaagaagatgaagaactactggcggcagctgctgaacgccaagctgattacccagagaaagttcgacaatctgaccaaggccgagagaggcggcctgagcgaactggataaggccggcttcatcaagagacagctggtggaaacccggcagatcacaaagcacgtggcacagatcctggactcccggatgaacactaagtacgacgagaatgacaagctgatccgggaagtgaaagtgatcaccctgaagtccaagctggtgtccgatttccggaaggatttccagttttacaaagtgcgcgagatcaacaactaccaccacgcccacgacgcctacctgaacgccgtcgtgggaaccgccctgatcaaaaagtaccctaagctggaaagcgagttcgtgtacggcgactacaaggtgtacgacgtgcggaagatgatcgccaagagcgagcaggaaatcggcaaggctaccgccaagtacttcttctacagcaacatcatgaactttttcaagaccgagattaccctggccaacggcgagatccggaagcggcctctgatcgagacaaacggcgaaaccggggagatcgtgtgggataagggccgggattttgccaccgtgcggaaagtgctgagcatgccccaagtgaatatcgtgaaaaagaccgaggtgcagacaggcggcttcagcaaagagtctatcctgcccaagaggaacagcgataagctgatcgccagaaagaaggactgggaccctaagaagtacggcggcttcgacagccccaccgtggcctattctgtgctggtggtggccaaagtggaaaagggcaagtccaagaaactgaagagtgtgaaagagctgctggggatcaccatcatggaaagaagcagcttcgagaagaatcccatcgactttctggaagccaagggctacaaagaagtgaaaaaggacctgatcatcaagctgcctaagtactccctgttcgagctggaaaacggccggaagagaatgctggcctctgccggcgaactgcagaagggaaacgaactggccctgccctccaaatatgtgaacttcctgtacctggccagccactatgagaagctgaagggctcccccgaggataatgagcagaaacagctgtttgtggaacagcacaagcactacctggacgagatcatcgagcagatcagcgagttctccaagagagtgatcctggccgacgctaatctggacaaagtgctgtccgcctacaacaagcaccgggataagcccatcagagagcaggccgagaatatcatccacctgtttaccctgaccaatctgggagcccctgccgccttcaagtactttgacaccaccatcgaccggaagaggtacaccagcaccaaagaggtgctggacgccaccctgatccaccagagcatcaccggcctgtacgagacacggatcgacctgtctcagctgggaggtgactccggcggcagcgaggccgccgccaaggaagccgccgccaaggaagccgctgccaaggaggccgctgctaaaagcggcggatctaccctgaacatcgaggacgagtacaggctgcacgagaccagcaaggagcccgacgtgagcctgggcagcacctggctgagcgatttccctcaggcttgggccgagaccggcggcatgggcctggccgtgcggcaggcccccctgattatccccctgaaggccaccagcacccccgtgagcatcaagcagtacccaatgtcccaggaggccaggctgggcatcaagcctcacatccagaggctgctggaccagggcatcctggtgccatgccagtccccctggaacacccctctgctgcccgtgaagaagcctggcaccaacgactaccggcccgtgcaggacctgagagaagtgaacaagcgggtggaggacatccacccaaccgtgcccaacccttacaacctgctgtccggcctgccccccagccaccagtggtacaccgtgctggacctgaaggacgccttcttctgcctgagactgcaccccacctctcagcccctgttcgccttcgagtggcgcgaccccgagatgggcatcagcggccagctgacctggaccagactgccacagggctttaagaatagcccaaccctgtttaacgaggccctgcacagggacctggccgacttcaggatccagcaccccgacctgattctgctgcagtacgtggacgacctgctgctggccgctaccagcgagctggactgccagcagggcaccagagccctgctgcagaccctgggcaacctgggctacagagccagcgccaagaaggcccagatctgtcagaagcaggtgaagtatctgggctacctgctgaaggaaggccagagatggctgaccgaggccagaaaggagactgtgatgggccagcccacccccaagacccccaggcagctgcgggagttcctgggcaaggccggcttttgcagactgtttatccctggcttcgccgagatggccgccccactgtaccctctgaccaagcctggcaccctgtttaactggggccccgaccagcagaaggcctaccaggagatcaagcaggccctgctgaccgcccccgccctgggcctgcccgacctgaccaagcctttcgagctgttcgtggacgagaagcagggatacgccaaaggcgtgctgacccagaagctgggcccctggcggaggcccgtggcctacctgagcaaaaaactggaccctgtggccgccggctggcccccatgcctgcggatggtggccgccatcgctgtgctgaccaaggacgccggcaagctgaccatgggccagcccctggtgatcctggcccctcacgccgtggaggctctggtgaagcagcctccagacaggtggctgtccaacgccaggatgacccactaccaggccctgctgctggacaccgaccgggtgcagttcggccctgtggtggccctgaaccccgccaccctgctgcctctgccagaggagggcctgcagcacaactgcctggacatcctggccgaggcccacggcaccaggcccgacctgaccgaccagcccctgcctgacgccgaccacacctggtacaccgacggcagctccctgctgcaggagggccagaggaaggccggcgccgccgtgaccaccgagaccgaggtgatctgggccaaagccctgcctgccggcacctccgcccagcgggccgagctgatcgccctgacccaggccctgaagatggctgagggcaagaagctgaacgtgtacaccgattccagatacgccttcgccaccgcccacatccacggcgagatctacagaagaaggggctggctgacctccgagggcaaggagatcaagaacaaggacgagattctggccctgctgaaggccctgttcctgcctaagagactgagcatcatccactgtcccggccaccagaagggccacagcgccgaggccagaggcaatagaatggccgaccaggccgccagaaaggccgccatcaccgagacccccgacaccagcaccctgctgatcgagaacagcagccccagcggcggctccaaacgcaccgccgacgggagcgagttcgagcccaagaagaagaggaaagtc

SEQ ID NO: 108 - DNA, 6216 bp, synthetic construct
  misc_feature 1..6216: note = Description of Artificial Sequence: Synthetic polynucleotide
  source 1..6216: mol_type = other DNA
gacaagaagtacagcatcggcctggacatcggcaccaactctgtgggctgggccgtgatcaccgacgagtacaaggtgcccagcaagaaattcaaggtgctgggcaacaccgaccggcacagcatcaagaagaacctgatcggagccctgctgttcgacagcggcgaaacagccgaggccacccggctgaagagaaccgccagaagaagatacaccagacggaagaaccggatctgctatctgcaagagatcttcagcaacgagatggccaaggtggacgacagcttcttccacagactggaagagtccttcctggtggaagaggataagaagcacgagcggcaccccatcttcggcaacatcgtggacgaggtggcctaccacgagaagtaccccaccatctaccacctgagaaagaaactggtggacagcaccgacaaggccgacctgcggctgatctatctggccctggcccacatgatcaagttccggggccacttcctgatcgagggcgacctgaaccccgacaacagcgacgtggacaagctgttcatccagctggtgcagacctacaaccagctgttcgaggaaaaccccatcaacgccagcggcgtggacgccaaggccatcctgtctgccagactgagcaagagcagacggctggaaaatctgatcgcccagctgcccggcgagaagaagaatggcctgttcggaaacctgattgccctgagcctgggcctgacccccaacttcaagagcaacttcgacctggccgaggatgccaaactgcagctgagcaaggacacctacgacgacgacctggacaacctgctggcccagatcggcgaccagtacgccgacctgtttctggccgccaagaacctgtccgacgccatcctgctgagcgacatcctgagagtgaacaccgagatcaccaaggcccccctgagcgcctctatgatcaagagatacgacgagcaccaccaggacctgaccctgctgaaagctctcgtgcggcagcagctgcctgagaagtacaaagagattttcttcgaccagagcaagaacggctacgccggctacattgacggcggagccagccaggaagagttctacaagttcatcaagcccatcctggaaaagatggacggcaccgaggaactgctcgtgaagctgaacagagaggacctgctgcggaagcagcggaccttcgacaacggcagcatcccccaccagatccacctgggagagctgcacgccattctgcggcggcaggaagatttttacccattcctgaaggacaaccgggaaaagatcgagaagatcctgaccttccgcatcccctactacgtgggccctctggccaggggaaacagcagattcgcctggatgaccagaaagagcgaggaaaccatcaccccctggaacttcgaggaagtggtggacaagggcgcttccgcccagagcttcatcgagcggatgaccaacttcgataagaacctgcccaacgagaaggtgctgcccaagcacagcctgctgtacgagtacttcaccgtgtataacgagctgaccaaagtgaaatacgtgaccgagggaatgagaaagcccgccttcctgagcggcgagcagaaaaaggccatcgtggacctgctgttcaagaccaaccggaaagtgaccgtgaagcagctgaaagaggactacttcaagaaaatcgagtgcttcgactccgtggaaatctccggcgtggaagatcggttcaacgcctccctgggcacataccacgatctgctgaaaattatcaaggacaaggacttcctggacaatgaggaaaacgaggacattctggaagatatcgtgctgaccctgacactgtttgaggacagagagatgatcgaggaacggctgaaaacctatgcccacctgttcgacgacaaagtgatgaagcagctgaagcggcggagatacaccggctggggcaggctgagccggaagctgatcaacggcatccgggacaagcagtccggcaagacaatcctggatttcctgaagtccgacggcttcgccaacagaaacttcatgcagctgatccacgacgacagcctgacctttaaagaggacatccagaaagcccaggtgtccggccagggcgatagcctgcacgagcacattgccaatctggccggcagccccgccattaagaagggcatcctgcagacagtgaaggtggtggacgagctcgtgaaagtgatgggccggcacaagcccgagaacatcgtgatcgaaatggccagagagaaccagaccacccagaagggacagaagaacagccgcgagagaatgaagcggatcgaagagggcatcaaagagctgggcagccagatcctgaaagaacaccccgtggaaaacacccagctgcagaacgagaagctgtacctgtactacctgcagaatgggcgggatatgtacgtggaccaggaactggacatcaaccggctgtccgactacgatgtggacgctatcgtgcctcagagctttctgaaggacgactccatcgacaacaaggtgctgaccagaagcgacaagaaccggggcaagagcgacaacgtgccctccgaagaggtcgtgaagaagatgaagaactactggcggcagctgctgaacgccaagctgattacccagagaaagttcgacaatctgaccaaggccgagagaggcggcctgagcgaactggataaggccggcttcatcaagagacagctggtggaaacccggcagatcacaaagcacgtggcacagatcctggactcccggatgaacactaagtacgacgagaatgacaagctgatccgggaagtgaaagtgatcaccctgaagtccaagctggtgtccgatttccggaaggatttccagttttacaaagtgcgcgagatcaacaactaccaccacgcccacgacgcctacctgaacgccgtcgtgggaaccgccctgatcaaaaagtaccctaagctggaaagcgagttcgtgtacggcgactacaaggtgtacgacgtgcggaagatgatcgccaagagcgagcaggaaatcggcaaggctaccgccaagtacttcttctacagcaacatcatgaactttttcaagaccgagattaccctggccaacggcgagatccggaagcggcctctgatcgagacaaacggcgaaaccggggagatcgtgtgggataagggccgggattttgccaccgtgcggaaagtgctgagcatgccccaagtgaatatcgtgaaaaagaccgaggtgcagacaggcggcttcagcaaagagtctatcctgcccaagaggaacagcgataagctgatcgccagaaagaaggactgggaccctaagaagtacggcggcttcgacagccccaccgtggcctattctgtgctggtggtggccaaagtggaaaagggcaagtccaagaaactgaagagtgtgaaagagctgctggggatcaccatcatggaaagaagcagcttcgagaagaatcccatcgactttctggaagccaagggctacaaagaagtgaaaaaggacctgatcatcaagctgcctaagtactccctgttcgagctggaaaacggccggaagagaatgctggcctctgccggcgaactgcagaagggaaacgaactggccctgccctccaaatatgtgaacttcctgtacctggccagccactatgagaagctgaagggctcccccgaggataatgagcagaaacagctgtttgtggaacagcacaagcactacctggacgagatcatcgagcagatcagcgagttctccaagagagtgatcctggccgacgctaatctggacaaagtgctgtccgcctacaacaagcaccgggataagcccatcagagagcaggccgagaatatcatccacctgtttaccctgaccaatctgggagcccctgccgccttcaagtactttgacaccaccatcgaccggaagaggtacaccagcaccaaagaggtgctggacgccaccctgatccaccagagcatcaccggcctgtacgagacacggatcgacctgtctcagctgggaggtgactccggcggcagcgaggccgccgccaaggaagccgccgccaaggaagccgctgccaaggaggccgctgctaaaagcggcggatctaccctgaacatcgaggacgagtacaggctgcacgagaccagcaaggagcccgacgtgagcctgggcagcacctggctgagcgatttccctcaggcttgggccgagaccggcggcatgggcctggccgtgcggcaggcccccctgattatccccctgaaggccaccagcacccccgtgagcatcaagcagtacccaatgtcccaggaggccaggctgggcatcaagcctcacatccagaggctgctggaccagggcatcctggtgccatgccagtccccctggaacacccctctgctgcccgtgaagaagcctggcaccaacgactaccggcccgtgcaggacctgagagaagtgaacaagcgggtggaggacatccacccaaccgtgcccaacccttacaacctgctgtccggcctgccccccagccaccagtggtacaccgtgctggacctgaaggacgccttcttctgcctgagactgcaccccacctctcagcccctgttcgccttcgagtggcgcgaccccgagatgggcatcagcggccagctgacctggaccagactgccacagggctttaagaatagcccaaccctgtttaacgaggccctgcacagggacctggccgacttcaggatccagcaccccgacctgattctgctgcagtacgtggacgacctgctgctggccgctaccagcgagctggactgccagcagggcaccagagccctgctgcagaccctgggcaacctgggctacagagccagcgccaagaaggcccagatctgtcagaagcaggtgaagtatctgggctacctgctgaaggaaggccagagatggctgaccgaggccagaaaggagactgtgatgggccagcccacccccaagacccccaggcagctgcgggagttcctgggcaaggccggcttttgcagactgtttatccctggcttcgccgagatggccgccccactgtaccctctgaccaagcctggcaccctgtttaactggggccccgaccagcagaaggcctaccaggagatcaagcaggccctgctgaccgcccccgccctgggcctgcccgacctgaccaagcctttcgagctgttcgtggacgagaagcagggatacgccaaaggcgtgctgacccagaagctgggcccctggcggaggcccgtggcctacctgagcaaaaaactggaccctgtggccgccggctggcccccatgcctgcggatggtggccgccatcgctgtgctgaccaaggacgccggcaagctgaccatgggccagcccctggtgatcctggcccctcacgccgtggaggctctggtgaagcagcctccagacaggtggctgtccaacgccaggatgacccactaccaggccctgctgctggacaccgaccgggtgcagttcggccctgtggtggccctgaaccccgccaccctgctgcctctgccagaggagggcctgcagcacaactgcctggacatcctggccgaggcccacggcaccaggcccgacctgaccgaccagcccctgcctgacgccgaccacacctggtacaccgacggcagctccctgctgcaggagggccagaggaaggccggcgccgccgtgaccaccgagaccgaggtgatctgggccaaagccctgcctgccggcacctccgcccagcgggccgagctgatcgccctgacccaggccctgaagatggctgagggcaagaagctgaacgtgtacaccgattccagatacgccttcgccaccgcccacatccacggcgagatctacagaagaaggggctggctgacctccgagggcaaggagatcaagaacaaggacgagattctggccctgctgaaggccctgttcctgcctaagagactgagcatcatccactgtcccggccaccagaagggccacagcgccgaggccagaggcaatagaatggccgaccaggccgccagaaaggccgccatcaccgagacccccgacaccagcaccctgctgatcgagaacagcagcccc

SEQ ID NO: 109 - RNA, 6216 nt, synthetic construct
  misc_feature 1..6216: note = Description of Artificial Sequence: Synthetic polynucleotide
  source 1..6216: mol_type = other RNA
gacaagaagtacagcatcggcctggacatcggcaccaactctgtgggctgggccgtgatcaccgacgagtacaaggtgcccagcaagaaattcaaggtgctgggcaacaccgaccggcacagcatcaagaagaacctgatcggagccctgctgttcgacagcggcgaaacagccgaggccacccggctgaagagaaccgccagaagaagatacaccagacggaagaaccggatctgctatctgcaagagatcttcagcaacgagatggccaaggtggacgacagcttcttccacagactggaagagtccttcctggtggaagaggataagaagcacgagcggcaccccatcttcggcaacatcgtggacgaggtggcctaccacgagaagtaccccaccatctaccacctgagaaagaaactggtggacagcaccgacaaggccgacctgcggctgatctatctggccctggcccacatgatcaagttccggggccacttcctgatcgagggcgacctgaaccccgacaacagcgacgtggacaagctgttcatccagctggtgcagacctacaaccagctgttcgaggaaaaccccatcaacgccagcggcgtggacgccaaggccatcctgtctgccagactgagcaagagcagacggctggaaaatctgatcgcccagctgcccggcgagaagaagaatggcctgttcggaaacctgattgccctgagcctgggcctgacccccaacttcaagagcaacttcgacctggccgaggatgccaaactgcagctgagcaaggacacctacgacgacgacctggacaacctgctggcccagatcggcgaccagtacgccgacctgtttctggccgccaagaacctgtccgacgccatcctgctgagcgacatcctgagagtgaacaccgagatcaccaaggcccccctgagcgcctctatgatcaagagatacgacgagcaccaccaggacctgaccctgctgaaagctctcgtgcggcagcagctgcctgagaagtacaaagagattttcttcgaccagagcaagaacggctacgccggctacattgacggcggagccagccaggaagagttctacaagttcatcaagcccatcctggaaaagatggacggcaccgaggaactgctcgtgaagctgaacagagaggacctgctgcggaagcagcggaccttcgacaacggcagcatcccccaccagatccacctgggagagctgcacgccattctgcggcggcaggaagatttttacccattcctgaaggacaaccgggaaaagatcgagaagatcctgaccttccgcatcccctactacgtgggccctctggccaggggaaacagcagattcgcctggatgaccagaaagagcgaggaaaccatcaccccctggaacttcgaggaagtggtggacaagggcgcttccgcccagagcttcatcgagcggatgaccaacttcgataagaacctgcccaacgagaaggtgctgcccaagcacagcctgctgtacgagtacttcaccgtgtataacgagctgaccaaagtgaaatacgtgaccgagggaatgagaaagcccgccttcctgagcggcgagcagaaaaaggccatcgtggacctgctgttcaagaccaaccggaaagtgaccgtgaagcagctgaaagaggactacttcaagaaaatcgagtgcttcgactccgtggaaatctccggcgtggaagatcggttcaacgcctccctgggcacataccacgatctgctgaaaattatcaaggacaaggacttcctggacaatgaggaaaacgaggacattctggaagatatcgtgctgaccctgacactgtttgaggacagagagatgatcgaggaacggctgaaaacctatgcccacctgttcgacgacaaagtgatgaagcagctgaagcggcggagatacaccggctggggcaggctgagccggaagctgatcaacggcatccgggacaagcagtccggcaagacaatcctggatttcctgaagtccgacggcttcgccaacagaaacttcatgcagctgatccacgacgacagcctgacctttaaagaggacatccagaaagcccaggtgtccggccagggcgatagcctgcacgagcacattgccaatctggccggcagccccgccattaagaagggcatcctgcagacagtgaaggtggtggacgagctcgtgaaagtgatgggccggcacaagcccgagaacatcgtgatcgaaatggccagagagaaccagaccacccagaagggacagaagaacagccgcgagagaatgaagcggatcgaagagggcatcaaagagctgggcagccagatcctgaaagaacaccccgtggaaaacacccagctgcagaacgagaagctgtacctgtactacctgcagaatgggcgggatatgtacgtggaccaggaactggacatcaaccggctgtccgactacgatgtggacgctatcgtgcctcagagctttctgaaggacgactccatcgacaacaaggtgctgaccagaagcgacaagaaccggggcaagagcgacaacgtgccctccgaagaggtcgtgaagaagatgaagaactactggcggcagctgctgaacgccaagctgattacccagagaaagttcgacaatctgaccaaggccgagagaggcggcctgagcgaactggataaggccggcttcatcaagagacagctggtggaaacccggcagatcacaaagcacgtggcacagatcctggactcccggatgaacactaagtacgacgagaatgacaagctgatccgggaagtgaaagtgatcaccctgaagtccaagctggtgtccgatttccggaaggatttccagttttacaaagtgcgcgagatcaacaactaccaccacgcccacgacgcctacctgaacgccgtcgtgggaaccgccctgatcaaaaagtaccctaagctggaaagcgagttcgtgtacggcgactacaaggtgtacgacgtgcggaagatgatcgccaagagcgagcaggaaatcggcaaggctaccgccaagtacttcttctacagcaacatcatgaactttttcaagaccgagattaccctggccaacggcgagatccggaagcggcctctgatcgagacaaacggcgaaaccggggagatcgtgtgggataagggccgggattttgccaccgtgcggaaagtgctgagcatgccccaagtgaatatcgtgaaaaagaccgaggtgcagacaggcggcttcagcaaagagtctatcctgcccaagaggaacagcgataagctgatcgccagaaagaaggactgggaccctaagaagtacggcggcttcgacagccccaccgtggcctattctgtgctggtggtggccaaagtggaaaagggcaagtccaagaaactgaagagtgtgaaagagctgctggggatcaccatcatggaaagaagcagcttcgagaagaatcccatcgactttctggaagccaagggctacaaagaagtgaaaaaggacctgatcatcaagctgcctaagtactccctgttcgagctggaaaacggccggaagagaatgctggcctctgccggcgaactgcagaagggaaacgaactggccctgccctccaaatatgtgaacttcctgtacctggccagccactatgagaagctgaagggctcccccgaggataatgagcagaaacagctgtttgtggaacagcacaagcactacctggacgagatcatcgagcagatcagcgagttctccaagagagtgatcctggccgacgctaatctggacaaagtgctgtccgcctacaacaagcaccgggataagcccatcagagagcaggccgagaatatcatccacctgtttaccctgaccaatctgggagcccctgccgccttcaagtactttgacaccaccatcgaccggaagaggtacaccagcaccaaagaggtgctggacgccaccctgatccaccagagcatcaccggcctgtacgagacacggatcgacctgtctcagctgggaggtgactccggcggcagcgaggccgccgccaaggaagccgccgccaaggaagccgctgccaaggaggccgctgctaaaagcggcggatctaccctgaacatcgaggacgagtacaggctgcacgagaccagcaaggagcccgacgtgagcctgggcagcacctggctgagcgatttccctcaggcttgggccgagaccggcggcatgggcctggccgtgcggcaggcccccctgattatccccctgaaggccaccagcacccccgtgagcatcaagcagtacccaatgtcccaggaggccaggctgggcatcaagcctcacatccagaggctgctggaccagggcatcctggtgccatgccagtccccctggaacacccctctgctgcccgtgaagaagcctggcaccaacgactaccggcccgtgcaggacctgagagaagtgaacaagcgggtggaggacatccacccaaccgtgcccaacccttacaacctgctgtccggcctgccccccagccaccagtggtacaccgtgctggacctgaaggacgccttcttctgcctgagactgcaccccacctctcagcccctgttcgccttcgagtggcgcgaccccgagatgggcatcagcggccagctgacctggaccagactgccacagggctttaagaatagcccaaccctgtttaacgaggccctgcacagggacctggccgacttcaggatccagcaccccgacctgattctgctgcagtacgtggacgacctgctgctggccgctaccagcgagctggactgccagcagggcaccagagccctgctgcagaccctgggcaacctgggctacagagccagcgccaagaaggcccagatctgtcagaagcaggtgaagtatctgggctacctgctgaaggaaggccagagatggctgaccgaggccagaaaggagactgtgatgggccagcccacccccaagacccccaggcagctgcgggagttcctgggcaaggccggcttttgcagactgtttatccctggcttcgccgagatggccgccccactgtaccctctgaccaagcctggcaccctgtttaactggggccccgaccagcagaaggcctaccaggagatcaagcaggccctgctgaccgcccccgccctgggcctgcccgacctgaccaagcctttcgagctgttcgtggacgagaagcagggatacgccaaaggcgtgctgacccagaagctgggcccctggcggaggcccgtggcctacctgagcaaaaaactggaccctgtggccgccggctggcccccatgcctgcggatggtggccgccatcgctgtgctgaccaaggacgccggcaagctgaccatgggccagcccctggtgatcctggcccctcacgccgtggaggctctggtgaagcagcctccagacaggtggctgtccaacgccaggatgacccactaccaggccctgctgctggacaccgaccgggtgcagttcggccctgtggtggccctgaaccccgccaccctgctgcctctgccagaggagggcctgcagcacaactgcctggacatcctggccgaggcccacggcaccaggcccgacctgaccgaccagcccctgcctgacgccgaccacacctggtacaccgacggcagctccctgctgcaggagggccagaggaaggccggcgccgccgtgaccaccgagaccgaggtgatctgggccaaagccctgcctgccggcacctccgcccagcgggccgagctgatcgccctgacccaggccctgaagatggctgagggcaagaagctgaacgtgtacaccgattccagatacgccttcgccaccgcccacatccacggcgagatctacagaagaaggggctggctgacctccgagggcaaggagatcaagaacaaggacgagattctggccctgctgaaggccctgttcctgcctaagagactgagcatcatccactgtcccggccaccagaagggccacagcgccgaggccagaggcaatagaatggccgaccaggccgccagaaaggccgccatcaccgagacccccgacaccagcaccctgctgatcgagaacagcagcccc

SEQ ID NO: 110 - protein, 1938 aa, synthetic construct
  REGION 1..1938: note = Description of Artificial Sequence: Synthetic polypeptide
MKRTADGSEFESPKKKRKVDKKYSIGLDIGTNSVGWAVITDEYKVPSKKFKVLGNTDRHSIKKNLIGALLFDSGETAEATRLKRTARRRYTRRKNRICYLQEIFSNEMAKVDDSFFHRLEESFLVEEDKKHERHPIFGNIVDEVAYHEKYPTIYHLRKKLVDSTDKADLRLIYLALAHMIKFRGHFLIEGDLNPDNSDVDKLFIQLVQTYNQLFEENPINASGVDAKAILSARLSKSRRLENLIAQLPGEKKNGLFGNLIALSLGLTPNFKSNFDLAEDAKLQLSKDTYDDDLDNLLAQIGDQYADLFLAAKNLSDAILLSDILRVNTEITKAPLSASMIKRYDEHHQDLTLLKALVRQQLPEKYKEIFFDQSKNGYAGYIDGGASQEEFYKFIKPILEKMDGTEELLVKLNREDLLRKQRTFDNGSIPHQIHLGELHAILRRQEDFYPFLKDNREKIEKILTFRIPYYVGPLARGNSRFAWMTRKSEETITPWNFEEVVDKGASAQSFIERMTNFDKNLPNEKVLPKHSLLYEYFTVYNELTKVKYVTEGMRKPAFLSGEQKKAIVDLLFKTNRKVTVKQLKEDYFKKIECFDSVEISGVEDRFNASLGTYHDLLKIIKDKDFLDNEENEDILEDIVLTLTLFEDREMIEERLKTYAHLFDDKVMKQLKRRRYTGWGRLSRKLINGIRDKQSGKTILDFLKSDGFANRNFMQLIHDDSLTFKEDIQKAQVSGQGDSLHEHIANLAGSPAIKKGILQTVKVVDELVKVMGRHKPENIVIEMARENQTTQKGQKNSRERMKRIEEGIKELGSQILKEHPVENTQLQNEKLYLYYLQNGRDMYVDQELDINRLSDYDVDAIVPQSFLKDDSIDNKVLTRSDKNRGKSDNVPSEEVVKKMKNYWRQLLNAKLITQRKFDNLTKAERGGLSELDKAGFIKRQLVETRQITKHVAQILDSRMNTKYDENDKLIREVKVITLKSKLVSDFRKDFQFYKVREINNYHHAHDAYLNAVVGTALIKKYPKLESEFVYGDYKVYDVRKMIAKSEQEIGKATAKYFFYSNIMNFFKTEITLANGEIRKRPLIETNGETGEIVWDKGRDFATVRKVLSMPQVNIVKKTEVQTGGFSKESILPKRNSDKLIARKKDWDPKKYGGFDSPTVAYSVLVVAKVEKGKSKKLKSVKELLGITIMERSSFEKNPIDFLEAKGYKEVKKDLIIKLPKYSLFELENGRKRMLASAGELQKGNELALPSKYVNFLYLASHYEKLKGSPEDNEQKQLFVEQHKHYLDEIIEQISEFSKRVILADANLDKVLSAYNKHRDKPIREQAENIIHLFTLTNLGAPAAFKYFDTTIDRKRYTSTKEVLDATLIHQSITGLYETRIDLSQLGGDSGGSEAAAKEAAAKEAAAKEAAAKSGGSTLNIEDEYRLHETSKEPDVSLGSTWLSDFPQAWAETGGMGLAVRQAPLIIPLKATSTPVSIKQYPMSQEARLGIKPHIQRLLDQGILVPCQSPWNTPLLPVKKPGTNDYRPVQDLREVNKRVEDIHPTVPNPYNLLSGLPPSHQWYTVLDLKDAFFCLRLHPTSQPLFAFEWRDPEMGISGQLTWTRLPQGFKNSPTLFNEALHRDLADFRIQHPDLILLQYVDDLLLAATSELDCQQGTRALLQTLGNLGYRASAKKAQICQKQVKYLGYLLKEGQRWLTEARKETVMGQPTPKTPRQLREFLGKAGFCRLFIPGFAEMAAPLYPLTKPGTLFNWGPDQQKAYQEIKQALLTAPALGLPDLTKPFELFVDEKQGYAKGVLTQKLGPWRRPVAYLSKKLDPVAAGWPPCLRMVAAIAVLTKDAGKLTMGQPLVILAPHAVEALVKQPPDRWLSNARMTHYQALLLDTDRVQFGPVVALNPATLLPLPEEGLQHNCLDILAEAHGGGSKRTADGSEFEPKKKRKV

SEQ ID NO: 111 - protein, 1899 aa, synthetic construct
  REGION 1..1899: note = Description of Artificial Sequence: Synthetic polypeptide
DKKYSIGLDIGTNSVGWAVITDEYKVPSKKFKVLGNTDRHSIKKNLIGALLFDSGETAEATRLKRTARRRYTRRKNRICYLQEIFSNEMAKVDDSFFHRLEESFLVEEDKKHERHPIFGNIVDEVAYHEKYPTIYHLRKKLVDSTDKADLRLIYLALAHMIKFRGHFLIEGDLNPDNSDVDKLFIQLVQTYNQLFEENPINASGVDAKAILSARLSKSRRLENLIAQLPGEKKNGLFGNLIALSLGLTPNFKSNFDLAEDAKLQLSKDTYDDDLDNLLAQIGDQYADLFLAAKNLSDAILLSDILRVNTEITKAPLSASMIKRYDEHHQDLTLLKALVRQQLPEKYKEIFFDQSKNGYAGYIDGGASQEEFYKFIKPILEKMDGTEELLVKLNREDLLRKQRTFDNGSIPHQIHLGELHAILRRQEDFYPFLKDNREKIEKILTFRIPYYVGPLARGNSRFAWMTRKSEETITPWNFEEVVDKGASAQSFIERMTNFDKNLPNEKVLPKHSLLYEYFTVYNELTKVKYVTEGMRKPAFLSGEQKKAIVDLLFKTNRKVTVKQLKEDYFKKIECFDSVEISGVEDRFNASLGTYHDLLKIIKDKDFLDNEENEDILEDIVLTLTLFEDREMIEERLKTYAHLFDDKVMKQLKRRRYTGWGRLSRKLINGIRDKQSGKTILDFLKSDGFANRNFMQLIHDDSLTFKEDIQKAQVSGQGDSLHEHIANLAGSPAIKKGILQTVKVVDELVKVMGRHKPENIVIEMARENQTTQKGQKNSRERMKRIEEGIKELGSQILKEHPVENTQLQNEKLYLYYLQNGRDMYVDQELDINRLSDYDVDAIVPQSFLKDDSIDNKVLTRSDKNRGKSDNVPSEEVVKKMKNYWRQLLNAKLITQRKFDNLTKAERGGLSELDKAGFIKRQLVETRQITKHVAQILDSRMNTKYDENDKLIREVKVITLKSKLVSDFRKDFQFYKVREINNYHHAHDAYLNAVVGTALIKKYPKLESEFVYGDYKVYDVRKMIAKSEQEIGKATAKYFFYSNIMNFFKTEITLANGEIRKRPLIETNGETGEIVWDKGRDFATVRKVLSMPQVNIVKKTEVQTGGFSKESILPKRNSDKLIARKKDWDPKKYGGFDSPTVAYSVLVVAKVEKGKSKKLKSVKELLGITIMERSSFEKNPIDFLEAKGYKEVKKDLIIKLPKYSLFELENGRKRMLASAGELQKGNELALPSKYVNFLYLASHYEKLKGSPEDNEQKQLFVEQHKHYLDEIIEQISEFSKRVILADANLDKVLSAYNKHRDKPIREQAENIIHLFTLTNLGAPAAFKYFDTTIDRKRYTSTKEVLDATLIHQSITGLYETRIDLSQLGGDSGGSEAAAKEAAAKEAAAKEAAAKSGGSTLNIEDEYRLHETSKEPDVSLGSTWLSDFPQAWAETGGMGLAVRQAPLIIPLKATSTPVSIKQYPMSQEARLGIKPHIQRLLDQGILVPCQSPWNTPLLPVKKPGTNDYRPVQDLREVNKRVEDIHPTVPNPYNLLSGLPPSHQWYTVLDLKDAFFCLRLHPTSQPLFAFEWRDPEMGISGQLTWTRLPQGFKNSPTLFNEALHRDLADFRIQHPDLILLQYVDDLLLAATSELDCQQGTRALLQTLGNLGYRASAKKAQICQKQVKYLGYLLKEGQRWLTEARKETVMGQPTPKTPRQLREFLGKAGFCRLFIPGFAEMAAPLYPLTKPGTLFNWGPDQQKAYQEIKQALLTAPALGLPDLTKPFELFVDEKQGYAKGVLTQKLGPWRRPVAYLSKKLDPVAAGWPPCLRMVAAIAVLTKDAGKLTMGQPLVILAPHAVEALVKQPPDRWLSNARMTHYQALLLDTDRVQFGPVVALNPATLLPLPEEGLQHNCLDILAEAHG

SEQ ID NO: 112 - DNA, 5814 bp, synthetic construct
  misc_feature 1..5814: note = Description of Artificial Sequence: Synthetic polynucleotide
  source 1..5814: mol_type = other DNA
atgaaacggacagccgacggaagcgagttcgagtcaccaaagaagaagcggaaagtcgacaagaagtacagcatcggcctggacatcggcaccaactctgtgggctgggccgtgatcaccgacgagtacaaggtgcccagcaagaaattcaaggtgctgggcaacaccgaccggcacagcatcaagaagaacctgatcggagccctgctgttcgacagcggcgaaacagccgaggccacccggctgaagagaaccgccagaagaagatacaccagacggaagaaccggatctgctatctgcaagagatcttcagcaacgagatggccaaggtggacgacagcttcttccacagactggaagagtccttcctggtggaagaggataagaagcacgagcggcaccccatcttcggcaacatcgtggacgaggtggcctaccacgagaagtaccccaccatctaccacctgagaaagaaactggtggacagcaccgacaaggccgacctgcggctgatctatctggccctggcccacatgatcaagttccggggccacttcctgatcgagggcgacctgaaccccgacaacagcgacgtggacaagctgttcatccagctggtgcagacctacaaccagctgttcgaggaaaaccccatcaacgccagcggcgtggacgccaaggccatcctgtctgccagactgagcaagagcagacggctggaaaatctgatcgcccagctgcccggcgagaagaagaatggcctgttcggaaacctgattgccctgagcctgggcctgacccccaacttcaagagcaacttcgacctggccgaggatgccaaactgcagctgagcaaggacacctacgacgacgacctggacaacctgctggcccagatcggcgaccagtacgccgacctgtttctggccgccaagaacctgtccgacgccatcctgctgagcgacatcctgagagtgaacaccgagatcaccaaggcccccctgagcgcctctatgatcaagagatacgacgagcaccaccaggacctgaccctgctgaaagctctcgtgcggcagcagctgcctgagaagtacaaagagattttcttcgaccagagcaagaacggctacgccggctacattgacggcggagccagccaggaagagttctacaagttcatcaagcccatcctggaaaagatggacggcaccgaggaactgctcgtgaagctgaacagagaggacctgctgcggaagcagcggaccttcgacaacggcagcatcccccaccagatccacctgggagagctgcacgccattctgcggcggcaggaagatttttacccattcctgaaggacaaccgggaaaagatcgagaagatcctgaccttccgcatcccctactacgtgggccctctggccaggggaaacagcagattcgcctggatgaccagaaagagcgaggaaaccatcaccccctggaacttcgaggaagtggtggacaagggcgcttccgcccagagcttcatcgagcggatgaccaacttcgataagaacctgcccaacgagaaggtgctgcccaagcacagcctgctgtacgagtacttcaccgtgtataacgagctgaccaaagtgaaatacgtgaccgagggaatgagaaagcccgccttcctgagcggcgagcagaaaaaggccatcgtggacctgctgttcaagaccaaccggaaagtgaccgtgaagcagctgaaagaggactacttcaagaaaatcgagtgcttcgactccgtggaaatctccggcgtggaagatcggttcaacgcctccctgggcacataccacgatctgctgaaaattatcaaggacaaggacttcctggacaatgaggaaaacgaggacattctggaagatatcgtgctgaccctgacactgtttgaggacagagagatgatcgaggaacggctgaaaacctatgcccacctgttcgacgacaaagtgatgaagcagctgaagcggcggagatacaccggctggggcaggctgagccggaagctgatcaacggcatccgggacaagcagtccggcaagacaatcctggatttcctgaagtccgacggcttcgccaacagaaacttcatgcagctgatccacgacgacagcctgacctttaaagaggacatccagaaagcccaggtgtccggccagggcgatagcctgcacgagcacattgccaatctggccggcagccccgccattaagaagggcatcctgcagacagtgaaggtggtggacgagctcgtgaaagtgatgggccggcacaagcccgagaacatcgtgatcgaaatggccagagagaaccagaccacccagaagggacagaagaacagccgcgagagaatgaagcggatcgaagagggcatcaaagagctgggcagccagatcctgaaagaacaccccgtggaaaacacccagctgcagaacgagaagctgtacctgtactacctgcagaatgggcgggatatgtacgtggaccaggaactggacatcaaccggctgtccgactacgatgtggacgctatcgtgcctcagagctttctgaaggacgactccatcgacaacaaggtgctgaccagaagcgacaagaaccggggcaagagcgacaacgtgccctccgaagaggtcgtgaagaagatgaagaactactggcggcagctgctgaacgccaagctgattacccagagaaagttcgacaatctgaccaaggccgagagaggcggcctgagcgaactggataaggccggcttcatcaagagacagctggtggaaacccggcagatcacaaagcacgtggcacagatcctggactcccggatgaacactaagtacgacgagaatgacaagctgatccgggaagtgaaagtgatcaccctgaagtccaagctggtgtccgatttccggaaggatttccagttttacaaagtgcgcgagatcaacaactaccaccacgcccacgacgcctacctgaacgccgtcgtgggaaccgccctgatcaaaaagtaccctaagctggaaagcgagttcgtgtacggcgactacaaggtgtacgacgtgcggaagatgatcgccaagagcgagcaggaaatcggcaaggctaccgccaagtacttcttctacagcaacatcatgaactttttcaagaccgagattaccctggccaacggcgagatccggaagcggcctctgatcgagacaaacggcgaaaccggggagatcgtgtgggataagggccgggattttgccaccgtgcggaaagtgctgagcatgccccaagtgaatatcgtgaaaaagaccgaggtgcagacaggcggcttcagcaaagagtctatcctgcccaagaggaacagcgataagctgatcgccagaaagaaggactgggaccctaagaagtacggcggcttcgacagccccaccgtggcctattctgtgctggtggtggccaaagtggaaaagggcaagtccaagaaactgaagagtgtgaaagagctgctggggatcaccatcatggaaagaagcagcttcgagaagaatcccatcgactttctggaagccaagggctacaaagaagtgaaaaaggacctgatcatcaagctgcctaagtactccctgttcgagctggaaaacggccggaagagaatgctggcctctgccggcgaactgcagaagggaaacgaactggccctgccctccaaatatgtgaacttcctgtacctggccagccactatgagaagctgaagggctcccccgaggataatgagcagaaacagctgtttgtggaacagcacaagcactacctggacgagatcatcgagcagatcagcgagttctccaagagagtgatcctggccgacgctaatctggacaaagtgctgtccgcctacaacaagcaccgggataagcccatcagagagcaggccgagaatatcatccacctgtttaccctgaccaatctgggagcccctgccgccttcaagtactttgacaccaccatcgaccggaagaggtacaccagcaccaaagaggtgctggacgccaccctgatccaccagagcatcaccggcctgtacgagacacggatcgacctgtctcagctgggaggtgactccggcggcagcgaggccgccgccaaggaagccgccgccaaggaagccgctgccaaggaggccgctgctaaaagcggcggatctaccctgaacatcgaggacgagtacaggctgcacgagaccagcaaggagcccgacgtgagcctgggcagcacctggctgagcgatttccctcaggcttgggccgagaccggcggcatgggcctggccgtgcggcaggcccccctgattatccccctgaaggccaccagcacccccgtgagcatcaagcagtacccaatgtcccaggaggccaggctgggcatcaagcctcacatccagaggctgctggaccagggcatcctggtgccatgccagtccccctggaacacccctctgctgcccgtgaagaagcctggcaccaacgactaccggcccgtgcaggacctgagagaagtgaacaagcgggtggaggacatccacccaaccgtgcccaacccttacaacctgctgtccggcctgccccccagccaccagtggtacaccgtgctggacctgaaggacgccttcttctgcctgagactgcaccccacctctcagcccctgttcgccttcgagtggcgcgaccccgagatgggcatcagcggccagctgacctggaccagactgccacagggctttaagaatagcccaaccctgtttaacgaggccctgcacagggacctggccgacttcaggatccagcaccccgacctgattctgctgcagtacgtggacgacctgctgctggccgctaccagcgagctggactgccagcagggcaccagagccctgctgcagaccctgggcaacctgggctacagagccagcgccaagaaggcccagatctgtcagaagcaggtgaagtatctgggctacctgctgaaggaaggccagagatggctgaccgaggccagaaaggagactgtgatgggccagcccacccccaagacccccaggcagctgcgggagttcctgggcaaggccggcttttgcagactgtttatccctggcttcgccgagatggccgccccactgtaccctctgaccaagcctggcaccctgtttaactggggccccgaccagcagaaggcctaccaggagatcaagcaggccctgctgaccgcccccgccctgggcctgcccgacctgaccaagcctttcgagctgttcgtggacgagaagcagggatacgccaaaggcgtgctgacccagaagctgggcccctggcggaggcccgtggcctacctgagcaaaaaactggaccctgtggccgccggctggcccccatgcctgcggatggtggccgccatcgctgtgctgaccaaggacgccggcaagctgaccatgggccagcccctggtgatcctggcccctcacgccgtggaggctctggtgaagcagcctccagacaggtggctgtccaacgccaggatgacccactaccaggccctgctgctggacaccgaccgggtgcagttcggccctgtggtggccctgaaccccgccaccctgctgcctctgccagaggagggcctgcagcacaactgcctggacatcctggccgaggcccacggcggcggctccaaacgcaccgccgacgggagcgagttcgagcccaagaagaagaggaaagtc

SEQ ID NO: 113 - RNA, 5814 nt, synthetic construct
  misc_feature 1..5814: note = Description of Artificial Sequence: Synthetic polynucleotide
  source 1..5814: mol_type = other RNA
atgaaacggacagccgacggaagcgagttcgagtcaccaaagaagaagcggaaagtcgacaagaagtacagcatcggcctggacatcggcaccaactctgtgggctgggccgtgatcaccgacgagtacaaggtgcccagcaagaaattcaaggtgctgggcaacaccgaccggcacagcatcaagaagaacctgatcggagccctgctgttcgacagcggcgaaacagccgaggccacccggctgaagagaaccgccagaagaagatacaccagacggaagaaccggatctgctatctgcaagagatcttcagcaacgagatggccaaggtggacgacagcttcttccacagactggaagagtccttcctggtggaagaggataagaagcacgagcggcaccccatcttcggcaacatcgtggacgaggtggcctaccacgagaagtaccccaccatctaccacctgagaaagaaactggtggacagcaccgacaaggccgacctgcggctgatctatctggccctggcccacatgatcaagttccggggccacttcctgatcgagggcgacctgaaccccgacaacagcgacgtggacaagctgttcatccagctggtgcagacctacaaccagctgttcgaggaaaaccccatcaacgccagcggcgtggacgccaaggccatcctgtctgccagactgagcaagagcagacggctggaaaatctgatcgcccagctgcccggcgagaagaagaatggcctgttcggaaacctgattgccctgagcctgggcctgacccccaacttcaagagcaacttcgacctggccgaggatgccaaactgcagctgagcaaggacacctacgacgacgacctggacaacctgctggcccagatcggcgaccagtacgccgacctgtttctggccgccaagaacctgtccgacgccatcctgctgagcgacatcctgagagtgaacaccgagatcaccaaggcccccctgagcgcctctatgatcaagagatacgacgagcaccaccaggacctgaccctgctgaaagctctcgtgcggcagcagctgcctgagaagtacaaagagattttcttcgaccagagcaagaacggctacgccggctacattgacggcggagccagccaggaagagttctacaagttcatcaagcccatcctggaaaagatggacggcaccgaggaactgctcgtgaagctgaacagagaggacctgctgcggaagcagcggaccttcgacaacggcagcatcccccaccagatccacctgggagagctgcacgccattctgcggcggcaggaagatttttacccattcctgaaggacaaccgggaaaagatcgagaagatcctgaccttccgcatcccctactacgtgggccctctggccaggggaaacagcagattcgcctggatgaccagaaagagcgaggaaaccatcaccccctggaacttcgaggaagtggtggacaagggcgcttccgcccagagcttcatcgagcggatgaccaacttcgataagaacctgcccaacgagaaggtgctgcccaagcacagcctgctgtacgagtacttcaccgtgtataacgagctgaccaaagtgaaatacgtgaccgagggaatgagaaagcccgccttcctgagcggcgagcagaaaaaggccatcgtggacctgctgttcaagaccaaccggaaagtgaccgtgaagcagctgaaagaggactacttcaagaaaatcgagtgcttcgactccgtggaaatctccggcgtggaagatcggttcaacgcctccctgggcacataccacgatctgctgaaaattatcaaggacaaggacttcctggacaatgaggaaaacgaggacattctggaagatatcgtgctgaccctgacactgtttgaggacagagagatgatcgaggaacggctgaaaacctatgcccacctgttcgacgacaaagtgatgaagcagctgaagcggcggagatacaccggctggggcaggctgagccggaagctgatcaacggcatccgggacaagcagtccggcaagacaatcctggatttcctgaagtccgacggcttcgccaacagaaacttcatgcagctgatccacgacgacagcctgacctttaaagaggacatccagaaagcccaggtgtccggccagggcgatagcctgcacgagcacattgccaatctggccggcagccccgccattaagaagggcatcctgcagacagtgaaggtggtggacgagctcgtgaaagtgatgggccggcacaagcccgagaacatcgtgatcgaaatggccagagagaaccagaccacccagaagggacagaagaacagccgcgagagaatgaagcggatcgaagagggcatcaaagagctgggcagccagatcctgaaagaacaccccgtggaaaacacccagctgcagaacgagaagctgtacctgtactacctgcagaatgggcgggatatgtacgtggaccaggaactggacatcaaccggctgtccgactacgatgtggacgctatcgtgcctcagagctttctgaaggacgactccatcgacaacaaggtgctgaccagaagcgacaagaaccggggcaagagcgacaacgtgccctccgaagaggtcgtgaagaagatgaagaactactggcggcagctgctgaacgccaagctgattacccagagaaagttcgacaatctgaccaaggccgagagaggcggcctgagcgaactggataaggccggcttcatcaagagacagctggtggaaacccggcagatcacaaagcacgtggcacagatcctggactcccggatgaacactaagtacgacgagaatgacaagctgatccgggaagtgaaagtgatcaccctgaagtccaagctggtgtccgatttccggaaggatttccagttttacaaagtgcgcgagatcaacaactaccaccacgcccacgacgcctacctgaacgccgtcgtgggaaccgccctgatcaaaaagtaccctaagctggaaagcgagttcgtgtacggcgactacaaggtgtacgacgtgcggaagatgatcgccaagagcgagcaggaaatcggcaaggctaccgccaagtacttcttctacagcaacatcatgaactttttcaagaccgagattaccctggccaacggcgagatccggaagcggcctctgatcgagacaaacggcgaaaccggggagatcgtgtgggataagggccgggattttgccaccgtgcggaaagtgctgagcatgccccaagtgaatatcgtgaaaaagaccgaggtgcagacaggcggcttcagcaaagagtctatcctgcccaagaggaacagcgataagctgatcgccagaaagaaggactgggaccctaagaagtacggcggcttcgacagccccaccgtggcctattctgtgctggtggtggccaaagtggaaaagggcaagtccaagaaactgaagagtgtgaaagagctgctggggatcaccatcatggaaagaagcagcttcgagaagaatcccatcgactttctggaagccaagggctacaaagaagtgaaaaaggacctgatcatcaagctgcctaagtactccctgttcgagctggaaaacggccggaagagaatgctggcctctgccggcgaactgcagaagggaaacgaactggccctgccctccaaatatgtgaacttcctgtacctggccagccactatgagaagctgaagggctcccccgaggataatgagcagaaacagctgtttgtggaacagcacaagcactacctggacgagatcatcgagcagatcagcgagttctccaagagagtgatcctggccgacgctaatctggacaaagtgctgtccgcctacaacaagcaccgggataagcccatcagagagcaggccgagaatatcatccacctgtttaccctgaccaatctgggagcccctgccgccttcaagtactttgacaccaccatcgaccggaagaggtacaccagcaccaaagaggtgctggacgccaccctgatccaccagagcatcaccggcctgtacgagacacggatcgacctgtctcagctgggaggtgactccggcggcagcgaggccgccgccaaggaagccgccgccaaggaagccgctgccaaggaggccgctgctaaaagcggcggatctaccctgaacatcgaggacgagtacaggctgcacgagaccagcaaggagcccgacgtgagcctgggcagcacctggctgagcgatttccctcaggcttgggccgagaccggcggcatgggcctggccgtgcggcaggcccccctgattatccccctgaaggccaccagcacccccgtgagcatcaagcagtacccaatgtcccaggaggccaggctgggcatcaagcctcacatccagaggctgctggaccagggcatcctggtgccatgccagtccccctggaacacccctctgctgcccgtgaagaagcctggcaccaacgactaccggcccgtgcaggacctgagagaagtgaacaagcgggtggaggacatccacccaaccgtgcccaacccttacaacctgctgtccggcctgccccccagccaccagtggtacaccgtgctggacctgaaggacgccttcttctgcctgagactgcaccccacctctcagcccctgttcgccttcgagtggcgcgaccccgagatgggcatcagcggccagctgacctggaccagactgccacagggctttaagaatagcccaaccctgtttaacgaggccctgcacagggacctggccgacttcaggatccagcaccccgacctgattctgctgcagtacgtggacgacctgctgctggccgctaccagcgagctggactgccagcagggcaccagagccctgctgcagaccctgggcaacctgggctacagagccagcgccaagaaggcccagatctgtcagaagcaggtgaagtatctgggctacctgctgaaggaaggccagagatggctgaccgaggccagaaaggagactgtgatgggccagcccacccccaagacccccaggcagctgcgggagttcctgggcaaggccggcttttgcagactgtttatccctggcttcgccgagatggccgccccactgtaccctctgaccaagcctggcaccctgtttaactggggccccgaccagcagaaggcctaccaggagatcaagcaggccctgctgaccgcccccgccctgggcctgcccgacctgaccaagcctttcgagctgttcgtggacgagaagcagggatacgccaaaggcgtgctgacccagaagctgggcccctggcggaggcccgtggcctacctgagcaaaaaactggaccctgtggccgccggctggcccccatgcctgcggatggtggccgccatcgctgtgctgaccaaggacgccggcaagctgaccatgggccagcccctggtgatcctggcccctcacgccgtggaggctctggtgaagcagcctccagacaggtggctgtccaacgccaggatgacccactaccaggccctgctgctggacaccgaccgggtgcagttcggccctgtggtggccctgaaccccgccaccctgctgcctctgccagaggagggcctgcagcacaactgcctggacatcctggccgaggcccacggcggcggctccaaacgcaccgccgacgggagcgagttcgagcccaagaagaagaggaaagtc

SEQ ID NO: 114 - DNA, 5697 bp, synthetic construct
  misc_feature 1..5697: note = Description of Artificial Sequence: Synthetic polynucleotide
  source 1..5697: mol_type = other DNA
gacaagaagtacagcatcggcctggacatcggcaccaactctgtgggctgggccgtgatcaccgacgagtacaaggtgcccagcaagaaattcaaggtgctgggcaacaccgaccggcacagcatcaagaagaacctgatcggagccctgctgttcgacagcggcgaaacagccgaggccacccggctgaagagaaccgccagaagaagatacaccagacggaagaaccggatctgctatctgcaagagatcttcagcaacgagatggccaaggtggacgacagcttcttccacagactggaagagtccttcctggtggaagaggataagaagcacgagcggcaccccatcttcggcaacatcgtggacgaggtggcctaccacgagaagtaccccaccatctaccacctgagaaagaaactggtggacagcaccgacaaggccgacctgcggctgatctatctggccctggcccacatgatcaagttccggggccacttcctgatcgagggcgacctgaaccccgacaacagcgacgtggacaagctgttcatccagctggtgcagacctacaaccagctgttcgaggaaaaccccatcaacgccagcggcgtggacgccaaggccatcctgtctgccagactgagcaagagcagacggctggaaaatctgatcgcccagctgcccggcgagaagaagaatggcctgttcggaaacctgattgccctgagcctgggcctgacccccaacttcaagagcaacttcgacctggccgaggatgccaaactgcagctgagcaaggacacctacgacgacgacctggacaacctgctggcccagatcggcgaccagtacgccgacctgtttctggccgccaagaacctgtccgacgccatcctgctgagcgacatcctgagagtgaacaccgagatcaccaaggcccccctgagcgcctctatgatcaagagatacgacgagcaccaccaggacctgaccctgctgaaagctctcgtgcggcagcagctgcctgagaagtacaaagagattttcttcgaccagagcaagaacggctacgccggctacattgacggcggagccagccaggaagagttctacaagttcatcaagcccatcctggaaaagatggacggcaccgaggaactgctcgtgaagctgaacagagaggacctgctgcggaagcagcggaccttcgacaacggcagcatcccccaccagatccacctgggagagctgcacgccattctgcggcggcaggaagatttttacccattcctgaaggacaaccgggaaaagatcgagaagatcctgaccttccgcatcccctactacgtgggccctctggccaggggaaacagcagattcgcctggatgaccagaaagagcgaggaaaccatcaccccctggaacttcgaggaagtggtggacaagggcgcttccgcccagagcttcatcgagcggatgaccaacttcgataagaacctgcccaacgagaaggtgctgcccaagcacagcctgctgtacgagtacttcaccgtgtataacgagctgaccaaagtgaaatacgtgaccgagggaatgagaaagcccgccttcctgagcggcgagcagaaaaaggccatcgtggacctgctgttcaagaccaaccggaaagtgaccgtgaagcagctgaaagaggactacttcaagaaaatcgagtgcttcgactccgtggaaatctccggcgtggaagatcggttcaacgcctccctgggcacataccacgatctgctgaaaattatcaaggacaaggacttcctggacaatgaggaaaacgaggacattctggaagatatcgtgctgaccctgacactgtttgaggacagagagatgatcgaggaacggctgaaaacctatgcccacctgttcgacgacaaagtgatgaagcagctgaagcggcggagatacaccggctggggcaggctgagccggaagctgatcaacggcatccgggacaagcagtccggcaagacaatcctggatttcctgaagtccgacggcttcgccaacagaaacttcatgcagctgatccacgacgacagcctgacctttaaagaggacatccagaaagcccaggtgtccggccagggcgatagcctgcacgagcacattgccaatctggccggcagccccgccattaagaagggcatcctgcagacagtgaaggtggtggacgagctcgtgaaagtgatgggccggcacaagcccgagaacatcgtgatcgaaatggccagagagaaccagaccacccagaagggacagaagaacagccgcgagagaatgaagcggatcgaagagggcatcaaagagctgggcagccagatcctgaaagaacaccccgtggaaaacacccagctgcagaacgagaagctgtacctgtactacctgcagaatgggcgggatatgtacgtggaccaggaactggacatcaaccggctgtccgactacgatgtggacgctatcgtgcctcagagctttctgaaggacgactccatcgacaacaaggtgctgaccagaagcgacaagaaccggggcaagagcgacaacgtgccctccgaagaggtcgtgaagaagatgaagaactactggcggcagctgctgaacgccaagctgattacccagagaaagttcgacaatctgaccaaggccgagagaggcggcctgagcgaactggataaggccggcttcatcaagagacagctggtggaaacccggcagatcacaaagcacgtggcacagatcctggactcccggatgaacactaagtacgacgagaatgacaagctgatccgggaagtgaaagtgatcaccctgaagtccaagctggtgtccgatttccggaaggatttccagttttacaaagtgcgcgagatcaacaactaccaccacgcccacgacgcctacctgaacgccgtcgtgggaaccgccctgatcaaaaagtaccctaagctggaaagcgagttcgtgtacggcgactacaaggtgtacgacgtgcggaagatgatcgccaagagcgagcaggaaatcggcaaggctaccgccaagtacttcttctacagcaacatcatgaactttttcaagaccgagattaccctggccaacggcgagatccggaagcggcctctgatcgagacaaacggcgaaaccggggagatcgtgtgggataagggccgggattttgccaccgtgcggaaagtgctgagcatgccccaagtgaatatcgtgaaaaagaccgaggtgcagacaggcggcttcagcaaagagtctatcctgcccaagaggaacagcgataagctgatcgccagaaagaaggactgggaccctaagaagtacggcggcttcgacagccccaccgtggcctattctgtgctggtggtggccaaagtggaaaagggcaagtccaagaaactgaagagtgtgaaagagctgctggggatcaccatcatggaaagaagcagcttcgagaagaatcccatcgactttctggaagccaagggctacaaagaagtgaaaaaggacctgatcatcaagctgcctaagtactccctgttcgagctggaaaacggccggaagagaatgctggcctctgccggcgaactgcagaagggaaacgaactggccctgccctccaaatatgtgaacttcctgtacctggccagccactatgagaagctgaagggctcccccgaggataatgagcagaaacagctgtttgtggaacagcacaagcactacctggacgagatcatcgagcagatcagcgagttctccaagagagtgatcctggccgacgctaatctggacaaagtgctgtccgcctacaacaagcaccgggataagcccatcagagagcaggccgagaatatcatccacctgtttaccctgaccaatctgggagcccctgccgccttcaagtactttgacaccaccatcgaccggaagaggtacaccagcaccaaagaggtgctggacgccaccctgatccaccagagcatcaccggcctgtacgagacacggatcgacctgtctcagctgggaggtgactccggcggcagcgaggccgccgccaaggaagccgccgccaaggaagccgctgccaaggaggccgctgctaaaagcggcggatctaccctgaacatcgaggacgagtacaggctgcacgagaccagcaaggagcccgacgtgagcctgggcagcacctggctgagcgatttccctcaggcttgggccgagaccggcggcatgggcctggccgtgcggcaggcccccctgattatccccctgaaggccaccagcacccccgtgagcatcaagcagtacccaatgtcccaggaggccaggctgggcatcaagcctcacatccagaggctgctggaccagggcatcctggtgccatgccagtccccctggaacacccctctgctgcccgtgaagaagcctggcaccaacgactaccggcccgtgcaggacctgagagaagtgaacaagcgggtggaggacatccacccaaccgtgcccaacccttacaacctgctgtccggcctgccccccagccaccagtggtacaccgtgctggacctgaaggacgccttcttctgcctgagactgcaccccacctctcagcccctgttcgccttcgagtggcgcgaccccgagatgggcatcagcggccagctgacctggaccagactgccacagggctttaagaatagcccaaccctgtttaacgaggccctgcacagggacctggccgacttcaggatccagcaccccgacctgattctgctgcagtacgtggacgacctgctgctggccgctaccagcgagctggactgccagcagggcaccagagccctgctgcagaccctgggcaacctgggctacagagccagcgccaagaaggcccagatctgtcagaagcaggtgaagtatctgggctacctgctgaaggaaggccagagatggctgaccgaggccagaaaggagactgtgatgggccagcccacccccaagacccccaggcagctgcgggagttcctgggcaaggccggcttttgcagactgtttatccctggcttcgccgagatggccgccccactgtaccctctgaccaagcctggcaccctgtttaactggggccccgaccagcagaaggcctaccaggagatcaagcaggccctgctgaccgcccccgccctgggcctgcccgacctgaccaagcctttcgagctgttcgtggacgagaagcagggatacgccaaaggcgtgctgacccagaagctgggcccctggcggaggcccgtggcctacctgagcaaaaaactggaccctgtggccgccggctggcccccatgcctgcggatggtggccgccatcgctgtgctgaccaaggacgccggcaagctgaccatgggccagcccctggtgatcctggcccctcacgccgtggaggctctggtgaagcagcctccagacaggtggctgtccaacgccaggatgacccactaccaggccctgctgctggacaccgaccgggtgcagttcggccctgtggtggccctgaaccccgccaccctgctgcctctgccagaggagggcctgcagcacaactgcctggacatcctggccgaggcccacggc

SEQ ID NO: 115 - RNA, 5697 nt, synthetic construct
  misc_feature 1..5697: note = Description of Artificial Sequence: Synthetic polynucleotide
  source 1..5697: mol_type = other RNA
gacaagaagtacagcatcggcctggacatcggcaccaactctgtgggctgggccgtgatcaccgacgagtacaaggtgcccagcaagaaattcaaggtgctgggcaacaccgaccggcacagcatcaagaagaacctgatcggagccctgctgttcgacagcggcgaaacagccgaggccacccggctgaagagaaccgccagaagaagatacaccagacggaagaaccggatctgctatctgcaagagatcttcagcaacgagatggccaaggtggacgacagcttcttccacagactggaagagtccttcctggtggaagaggataagaagcacgagcggcaccccatcttcggcaacatcgtggacgaggtggcctaccacgagaagtaccccaccatctaccacctgagaaagaaactggtggacagcaccgacaaggccgacctgcggctgatctatctggccctggcccacatgatcaagttccggggccacttcctgatcgagggcgacctgaaccccgacaacagcgacgtggacaagctgttcatccagctggtgcagacctacaaccagctgttcgaggaaaaccccatcaacgccagcggcgtggacgccaaggccatcctgtctgccagactgagcaagagcagacggctggaaaatctgatcgcccagctgcccggcgagaagaagaatggcctgttcggaaacctgattgccctgagcctgggcctgacccccaacttcaagagcaacttcgacctggccgaggatgccaaactgcagctgagcaaggacacctacgacgacgacctggacaacctgctggcccagatcggcgaccagtacgccgacctgtttctggccgccaagaacctgtccgacgccatcctgctgagcgacatcctgagagtgaacaccgagatcaccaaggcccccctgagcgcctctatgatcaagagatacgacgagcaccaccaggacctgaccctgctgaaagctctcgtgcggcagcagctgcctgagaagtacaaagagattttcttcgaccagagcaagaacggctacgccggctacattgacggcggagccagccaggaagagttctacaagttcatcaagcccatcctggaaaagatggacggcaccgaggaactgctcgtgaagctgaacagagaggacctgctgcggaagcagcggaccttcgacaacggcagcatcccccaccagatccacctgggagagctgcacgccattctgcggcggcaggaagatttttacccattcctgaaggacaaccgggaaaagatcgagaagatcctgaccttccgcatcccctactacgtgggccctctggccaggggaaacagcagattcgcctggatgaccagaaagagcgaggaaaccatcaccccctggaacttcgaggaagtggtggacaagggcgcttccgcccagagcttcatcgagcggatgaccaacttcgataagaacctgcccaacgagaaggtgctgcccaagcacagcctgctgtacgagtacttcaccgtgtataacgagctgaccaaagtgaaatacgtgaccgagggaatgagaaagcccgccttcctgagcggcgagcagaaaaaggccatcgtggacctgctgttcaagaccaaccggaaagtgaccgtgaagcagctgaaagaggactacttcaagaaaatcgagtgcttcgactccgtggaaatctccggcgtggaagatcggttcaacgcctccctgggcacataccacgatctgctgaaaattatcaaggacaaggacttcctggacaatgaggaaaacgaggacattctggaagatatcgtgctgaccctgacactgtttgaggacagagagatgatcgaggaacggctgaaaacctatgcccacctgttcgacgacaaagtgatgaagcagctgaagcggcggagatacaccggctggggcaggctgagccggaagctgatcaacggcatccgggacaagcagtccggcaagacaatcctggatttcctgaagtccgacggcttcgccaacagaaacttcatgcagctgatccacgacgacagcctgacctttaaagaggacatccagaaagcccaggtgtccggccagggcgatagcctgcacgagcacattgccaatctggccggcagccccgccattaagaagggcatcctgcagacagtgaaggtggtggacgagctcgtgaaagtgatgggccggcacaagcccgagaacatcgtgatcgaaatggccagagagaaccagaccacccagaagggacagaagaacagccgcgagagaatgaagcggatcgaagagggcatcaaagagctgggcagccagatcctgaaagaacaccccgtggaaaacacccagctgcagaacgagaagctgtacctgtactacctgcagaatgggcgggatatgtacgtggaccaggaactggacatcaaccggctgtccgactacgatgtggacgctatcgtgcctcagagctttctgaaggacgactccatcgacaacaaggtgctgaccagaagcgacaagaaccggggcaagagcgacaacgtgccctccgaagaggtcgtgaagaagatgaagaactactggcggcagctgctgaacgccaagctgattacccagagaaagttcgacaatctgaccaaggccgagagaggcggcctgagcgaactggataaggccggcttcatcaagagacagctggtggaaacccggcagatcacaaagcacgtggcacagatcctggactcccggatgaacactaagtacgacgagaatgacaagctgatccgggaagtgaaagtgatcaccctgaagtccaagctggtgtccgatttccggaaggatttccagttttacaaagtgcgcgagatcaacaactaccaccacgcccacgacgcctacctgaacgccgtcgtgggaaccgccctgatcaaaaagtaccctaagctggaaagcgagttcgtgtacggcgactacaaggtgtacgacgtgcggaagatgatcgccaagagcgagcaggaaatcggcaaggctaccgccaagtacttcttctacagcaacatcatgaactttttcaagaccgagattaccctggccaacggcgagatccggaagcggcctctgatcgagacaaacggcgaaaccggggagatcgtgtgggataagggccgggattttgccaccgtgcggaaagtgctgagcatgccccaagtgaatatcgtgaaaaagaccgaggtgcagacaggcggcttcagcaaagagtctatcctgcccaagaggaacagcgataagctgatcgccagaaagaaggactgggaccctaagaagtacggcggcttcgacagccccaccgtggcctattctgtgctggtggtggccaaagtggaaaagggcaagtccaagaaactgaagagtgtgaaagagctgctggggatcaccatcatggaaagaagcagcttcgagaagaatcccatcgactttctggaagccaagggctacaaagaagtgaaaaaggacctgatcatcaagctgcctaagtactccctgttcgagctggaaaacggccggaagagaatgctggcctctgccggcgaactgcagaagggaaacgaactggccctgccctccaaatatgtgaacttcctgtacctggccagccactatgagaagctgaagggctcccccgaggataatgagcagaaacagctgtttgtggaacagcacaagcactacctggacgagatcatcgagcagatcagcgagttctccaagagagtgatcctggccgacgctaatctggacaaagtgctgtccgcctacaacaagcaccgggataagcccatcagagagcaggccgagaatatcatccacctgtttaccctgaccaatctgggagcccctgccgccttcaagtactttgacaccaccatcgaccggaagaggtacaccagcaccaaagaggtgctggacgccaccctgatccaccagagcatcaccggcctgtacgagacacggatcgacctgtctcagctgggaggtgactccggcggcagcgaggccgccgccaaggaagccgccgccaaggaagccgctgccaaggaggccgctgctaaaagcggcggatctaccctgaacatcgaggacgagtacaggctgcacgagaccagcaaggagcccgacgtgagcctgggcagcacctggctgagcgatttccctcaggcttgggccgagaccggcggcatgggcctggccgtgcggcaggcccccctgattatccccctgaaggccaccagcacccccgtgagcatcaagcagtacccaatgtcccaggaggccaggctgggcatcaagcctcacatccagaggctgctggaccagggcatcctggtgccatgccagtccccctggaacacccctctgctgcccgtgaagaagcctggcaccaacgactaccggcccgtgcaggacctgagagaagtgaacaagcgggtggaggacatccacccaaccgtgcccaacccttacaacctgctgtccggcctgccccccagccaccagtggtacaccgtgctggacctgaaggacgccttcttctgcctgagactgcaccccacctctcagcccctgttcgccttcgagtggcgcgaccccgagatgggcatcagcggccagctgacctggaccagactgccacagggctttaagaatagcccaaccctgtttaacgaggccctgcacagggacctggccgacttcaggatccagcaccccgacctgattctgctgcagtacgtggacgacctgctgctggccgctaccagcgagctggactgccagcagggcaccagagccctgctgcagaccctgggcaacctgggctacagagccagcgccaagaaggcccagatctgtcagaagcaggtgaagtatctgggctacctgctgaaggaaggccagagatggctgaccgaggccagaaaggagactgtgatgggccagcccacccccaagacccccaggcagctgcgggagttcctgggcaaggccggcttttgcagactgtttatccctggcttcgccgagatggccgccccactgtaccctctgaccaagcctggcaccctgtttaactggggccccgaccagcagaaggcctaccaggagatcaagcaggccctgctgaccgcccccgccctgggcctgcccgacctgaccaagcctttcgagctgttcgtggacgagaagcagggatacgccaaaggcgtgctgacccagaagctgggcccctggcggaggcccgtggcctacctgagcaaaaaactggaccctgtggccgccggctggcccccatgcctgcggatggtggccgccatcgctgtgctgaccaaggacgccggcaagctgaccatgggccagcccctggtgatcctggcccctcacgccgtggaggctctggtgaagcagcctccagacaggtggctgtccaacgccaggatgacccactaccaggccctgctgctggacaccgaccgggtgcagttcggccctgtggtggccctgaaccccgccaccctgctgcctctgccagaggagggcctgcagcacaactgcctggacatcctggccgaggcccacggc

SEQ ID NO: 116 - protein, 2132 aa, synthetic construct
  REGION 1..2132: note = Description of Artificial Sequence: Synthetic polypeptide
MKRTADGSEFESPKKKRKVDKKYSIGLDIGTNSVGWAVITDEYKVPSKKFKVLGNTDRHSIKKNLIGALLFDSGETAEATRLKRTARRRYTRRKNRICYLQEIFSNEMAKVDDSFFHRLEESFLVEEDKKHERHPIFGNIVDEVAYHEKYPTIYHLRKKLVDSTDKADLRLIYLALAHMIKFRGHFLIEGDLNPDNSDVDKLFIQLVQTYNQLFEENPINASGVDAKAILSARLSKSRRLENLIAQLPGEKKNGLFGNLIALSLGLTPNFKSNFDLAEDAKLQLSKDTYDDDLDNLLAQIGDQYADLFLAAKNLSDAILLSDILRVNTEITKAPLSASMIKRYDEHHQDLTLLKALVRQQLPEKYKEIFFDQSKNGYAGYIDGGASQEEFYKFIKPILEKMDGTEELLVKLNREDLLRKQRTFDNGSIPHQIHLGELHAILRRQEDFYPFLKDNREKIEKILTFRIPYYVGPLARGNSRFAWMTRKSEETITPWNFEEVVDKGASAQSFIERMTNFDKNLPNEKVLPKHSLLYEYFTVYNELTKVKYVTEGMRKPAFLSGEQKKAIVDLLFKTNRKVTVKQLKEDYFKKIECFDSVEISGVEDRFNASLGTYHDLLKIIKDKDFLDNEENEDILEDIVLTLTLFEDREMIEERLKTYAHLFDDKVMKQLKRRRYTGWGRLSRKLINGIRDKQSGKTILDFLKSDGFANRNFMQLIHDDSLTFKEDIQKAQVSGQGDSLHEHIANLAGSPAIKKGILQTVKVVDELVKVMGRHKPENIVIEMARENQTTQKGQKNSRERMKRIEEGIKELGSQILKEHPVENTQLQNEKLYLYYLQNGRDMYVDQELDINRLSDYDVDAIVPQSFLKDDSIDNKVLTRSDKNRGKSDNVPSEEVVKKMKNYWRQLLNAKLITQRKFDNLTKAERGGLSELDKAGFIKRQLVETRQITKHVAQILDSRMNTKYDENDKLIREVKVITLKSKLVSDFRKDFQFYKVREINNYHHAHDAYLNAVVGTALIKKYPKLESEFVYGDYKVYDVRKMIAKSEQEIGKATAKYFFYSNIMNFFKTEITLANGEIRKRPLIETNGETGEIVWDKGRDFATVRKVLSMPQVNIVKKTEVQTGGFSKESILPKRNSDKLIARKKDWDPKKYGGFDSPTVAYSVLVVAKVEKGKSKKLKSVKELLGITIMERSSFEKNPIDFLEAKGYKEVKKDLIIKLPKYSLFELENGRKRMLASAGELQKGNELALPSKYVNFLYLASHYEKLKGSPEDNEQKQLFVEQHKHYLDEIIEQISEFSKRVILADANLDKVLSAYNKHRDKPIREQAENIIHLFTLTNLGAPAAFKYFDTTIDRKRYTSTKEVLDATLIHQSITGLYETRIDLSQLGGDSGGSEAAAKEAAAKEAAAKEAAAKEAAAKEAAAKEAAAKEAAAKSGGSTLNIEDEYRLHETSKEPDVSLGSTWLSDFPQAWAETGGMGLAVRQAPLIIPLKATSTPVSIKQYPMSQEARLGIKPHIQRLLDQGILVPCQSPWNTPLLPVKKPGTNDYRPVQDLREVNKRVEDIHPTVPNPYNLLSGLPPSHQWYTVLDLKDAFFCLRLHPTSQPLFAFEWRDPEMGISGQLTWTRLPQGFKNSPTLFNEALHRDLADFRIQHPDLILLQYVDDLLLAATSELDCQQGTRALLQTLGNLGYRASAKKAQICQKQVKYLGYLLKEGQRWLTEARKETVMGQPTPKTPRQLREFLGKAGFCRLFIPGFAEMAAPLYPLTKPGTLFNWGPDQQKAYQEIKQALLTAPALGLPDLTKPFELFVDEKQGYAKGVLTQKLGPWRRPVAYLSKKLDPVAAGWPPCLRMVAAIAVLTKDAGKLTMGQPLVILAPHAVEALVKQPPDRWLSNARMTHYQALLLDTDRVQFGPVVALNPATLLPLPEEGLQHNCLDILAEAHGTRPDLTDQPLPDADHTWYTDGSSLLQEGQRKAGAAVTTETEVIWAKALPAGTSAQRAELIALTQALKMAEGKKLNVYTDSRYAFATAHIHGEIYRRRGWLTSEGKEIKNKDEILALLKALFLPKRLSIIHCPGHQKGHSAEARGNRMADQAARKAAITETPDTSTLLIENSSPSGGSKRTADGSEFEPKKKRKV

SEQ ID NO: 117 - protein, 2092 aa, synthetic construct
  REGION 1..2092: note = Description of Artificial Sequence: Synthetic polypeptide
DKKYSIGLDIGTNSVGWAVITDEYKVPSKKFKVLGNTDRHSIKKNLIGALLFDSGETAEATRLKRTARRRYTRRKNRICYLQEIFSNEMAKVDDSFFHRLEESFLVEEDKKHERHPIFGNIVDEVAYHEKYPTIYHLRKKLVDSTDKADLRLIYLALAHMIKFRGHFLIEGDLNPDNSDVDKLFIQLVQTYNQLFEENPINASGVDAKAILSARLSKSRRLENLIAQLPGEKKNGLFGNLIALSLGLTPNFKSNFDLAEDAKLQLSKDTYDDDLDNLLAQIGDQYADLFLAAKNLSDAILLSDILRVNTEITKAPLSASMIKRYDEHHQDLTLLKALVRQQLPEKYKEIFFDQSKNGYAGYIDGGASQEEFYKFIKPILEKMDGTEELLVKLNREDLLRKQRTFDNGSIPHQIHLGELHAILRRQEDFYPFLKDNREKIEKILTFRIPYYVGPLARGNSRFAWMTRKSEETITPWNFEEVVDKGASAQSFIERMTNFDKNLPNEKVLPKHSLLYEYFTVYNELTKVKYVTEGMRKPAFLSGEQKKAIVDLLFKTNRKVTVKQLKEDYFKKIECFDSVEISGVEDRFNASLGTYHDLLKIIKDKDFLDNEENEDILEDIVLTLTLFEDREMIEERLKTYAHLFDDKVMKQLKRRRYTGWGRLSRKLINGIRDKQSGKTILDFLKSDGFANRNFMQLIHDDSLTFKEDIQKAQVSGQGDSLHEHIANLAGSPAIKKGILQTVKVVDELVKVMGRHKPENIVIEMARENQTTQKGQKNSRERMKRIEEGIKELGSQILKEHPVENTQLQNEKLYLYYLQNGRDMYVDQELDINRLSDYDVDAIVPQSFLKDDSIDNKVLTRSDKNRGKSDNVPSEEVVKKMKNYWRQLLNAKLITQRKFDNLTKAERGGLSELDKAGFIKRQLVETRQITKHVAQILDSRMNTKYDENDKLIREVKVITLKSKLVSDFRKDFQFYKVREINNYHHAHDAYLNAVVGTALIKKYPKLESEFVYGDYKVYDVRKMIAKSEQEIGKATAKYFFYSNIMNFFKTEITLANGEIRKRPLIETNGETGEIVWDKGRDFATVRKVLSMPQVNIVKKTEVQTGGFSKESILPKRNSDKLIARKKDWDPKKYGGFDSPTVAYSVLVVAKVEKGKSKKLKSVKELLGITIMERSSFEKNPIDFLEAKGYKEVKKDLIIKLPKYSLFELENGRKRMLASAGELQKGNELALPSKYVNFLYLASHYEKLKGSPEDNEQKQLFVEQHKHYLDEIIEQISEFSKRVILADANLDKVLSAYNKHRDKPIREQAENIIHLFTLTNLGAPAAFKYFDTTIDRKRYTSTKEVLDATLIHQSITGLYETRIDLSQLGGDSGGSEAAAKEAAAKEAAAKEAAAKEAAAKEAAAKEAAAKEAAAKSGGSTLNIEDEYRLHETSKEPDVSLGSTWLSDFPQAWAETGGMGLAVRQAPLIIPLKATSTPVSIKQYPMSQEARLGIKPHIQRLLDQGILVPCQSPWNTPLLPVKKPGTNDYRPVQDLREVNKRVEDIHPTVPNPYNLLSGLPPSHQWYTVLDLKDAFFCLRLHPTSQPLFAFEWRDPEMGISGQLTWTRLPQGFKNSPTLFNEALHRDLADFRIQHPDLILLQYVDDLLLAATSELDCQQGTRALLQTLGNLGYRASAKKAQICQKQVKYLGYLLKEGQRWLTEARKETVMGQPTPKTPRQLREFLGKAGFCRLFIPGFAEMAAPLYPLTKPGTLFNWGPDQQKAYQEIKQALLTAPALGLPDLTKPFELFVDEKQGYAKGVLTQKLGPWRRPVAYLSKKLDPVAAGWPPCLRMVAAIAVLTKDAGKLTMGQPLVILAPHAVEALVKQPPDRWLSNARMTHYQALLLDTDRVQFGPVVALNPATLLPLPEEGLQHNCLDILAEAHGTRPDLTDQPLPDADHTWYTDGSSLLQEGQRKAGAAVTTETEVIWAKALPAGTSAQRAELIALTQALKMAEGKKLNVYTDSRYAFATAHIHGEIYRRRGWLTSEGKEIKNKDEILALLKALFLPKRLSIIHCPGHQKGHSAEARGNRMADQAARKAAITETPDTSTLLIENSSP

SEQ ID NO: 118 - DNA, 6396 bp, synthetic construct
  misc_feature 1..6396: note = Description of Artificial Sequence: Synthetic polynucleotide
  source 1..6396: mol_type = other DNA
atgaaacggacagccgacggaagcgagttcgagtcaccaaagaagaagcggaaagtcgacaagaagtacagcatcggcctggacatcggcaccaactctgtgggctgggccgtgatcaccgacgagtacaaggtgcccagcaagaaattcaaggtgctgggcaacaccgaccggcacagcatcaagaagaacctgatcggagccctgctgttcgacagcggcgaaacagccgaggccacccggctgaagagaaccgccagaagaagatacaccagacggaagaaccggatctgctatctgcaagagatcttcagcaacgagatggccaaggtggacgacagcttcttccacagactggaagagtccttcctggtggaagaggataagaagcacgagcggcaccccatcttcggcaacatcgtggacgaggtggcctaccacgagaagtaccccaccatctaccacctgagaaagaaactggtggacagcaccgacaaggccgacctgcggctgatctatctggccctggcccacatgatcaagttccggggccacttcctgatcgagggcgacctgaaccccgacaacagcgacgtggacaagctgttcatccagctggtgcagacctacaaccagctgttcgaggaaaaccccatcaacgccagcggcgtggacgccaaggccatcctgtctgccagactgagcaagagcagacggctggaaaatctgatcgcccagctgcccggcgagaagaagaatggcctgttcggaaacctgattgccctgagcctgggcctgacccccaacttcaagagcaacttcgacctggccgaggatgccaaactgcagctgagcaaggacacctacgacgacgacctggacaacctgctggcccagatcggcgaccagtacgccgacctgtttctggccgccaagaacctgtccgacgccatcctgctgagcgacatcctgagagtgaacaccgagatcaccaaggcccccctgagcgcctctatgatcaagagatacgacgagcaccaccaggacctgaccctgctgaaagctctcgtgcggcagcagctgcctgagaagtacaaagagattttcttcgaccagagcaagaacggctacgccggctacattgacggcggagccagccaggaagagttctacaagttcatcaagcccatcctggaaaagatggacggcaccgaggaactgctcgtgaagctgaacagagaggacctgctgcggaagcagcggaccttcgacaacggcagcatcccccaccagatccacctgggagagctgcacgccattctgcggcggcaggaagatttttacccattcctgaaggacaaccgggaaaagatcgagaagatcctgaccttccgcatcccctactacgtgggccctctggccaggggaaacagcagattcgcctggatgaccagaaagagcgaggaaaccatcaccccctggaacttcgaggaagtggtggacaagggcgcttccgcccagagcttcatcgagcggatgaccaacttcgataagaacctgcccaacgagaaggtgctgcccaagcacagcctgctgtacgagtacttcaccgtgtataacgagctgaccaaagtgaaatacgtgaccgagggaatgagaaagcccgccttcctgagcggcgagcagaaaaaggccatcgtggacctgctgttcaagaccaaccggaaagtgaccgtgaagcagctgaaagaggactacttcaagaaaatcgagtgcttcgactccgtggaaatctccggcgtggaagatcggttcaacgcctccctgggcacataccacgatctgctgaaaattatcaaggacaaggacttcctggacaatgaggaaaacgaggacattctggaagatatcgtgctgaccctgacactgtttgaggacagagagatgatcgaggaacggctgaaaacctatgcccacctgttcgacgacaaagtgatgaagcagctgaagcggcggagatacaccggctggggcaggctgagccggaagctgatcaacggcatccgggacaagcagtccggcaagacaatcctggatttcctgaagtccgacggcttcgccaacagaaacttcatgcagctgatccacgacgacagcctgacctttaaagaggacatccagaaagcccaggtgtccggccagggcgatagcctgcacgagcacattgccaatctggccggcagccccgccattaagaagggcatcctgcagacagtgaaggtggtggacgagctcgtgaaagtgatgggccggcacaagcccgagaacatcgtgatcgaaatggccagagagaaccagaccacccagaagggacagaagaacagccgcgagagaatgaagcggatcgaagagggcatcaaagagctgggcagccagatcctgaaagaacaccccgtggaaaacacccagctgcagaacgagaagctgtacctgtactacctgcagaatgggcgggatatgtacgtggaccaggaactggacatcaaccggctgtccgactacgatgtggacgctatcgtgcctcagagctttctgaaggacgactccatcgacaacaaggtgctgaccagaagcgacaagaaccggggcaagagcgacaacgtgccctccgaagaggtcgtgaagaagatgaagaactactggcggcagctgctgaacgccaagctgattacccagagaaagttcgacaatctgaccaaggccgagagaggcggcctgagcgaactggataaggccggcttcatcaagagacagctggtggaaacccggcagatcacaaagcacgtggcacagatcctggactcccggatgaacactaagtacgacgagaatgacaagctgatccgggaagtgaaagtgatcaccctgaagtccaagctggtgtccgatttccggaaggatttccagttttacaaagtgcgcgagatcaacaactaccaccacgcccacgacgcctacctgaacgccgtcgtgggaaccgccctgatcaaaaagtaccctaagctggaaagcgagttcgtgtacggcgactacaaggtgtacgacgtgcggaagatgatcgccaagagcgagcaggaaatcggcaaggctaccgccaagtacttcttctacagcaacatcatgaactttttcaagaccgagattaccctggccaacggcgagatccggaagcggcctctgatcgagacaaacggcgaaaccggggagatcgtgtgggataagggccgggattttgccaccgtgcggaaagtgctgagcatgccccaagtgaatatcgtgaaaaagaccgaggtgcagacaggcggcttcagcaaagagtctatcctgcccaagaggaacagcgataagctgatcgccagaaagaaggactgggaccctaagaagtacggcggcttcgacagccccaccgtggcctattctgtgctggtggtggccaaagtggaaaagggcaagtccaagaaactgaagagtgtgaaagagctgctggggatcaccatcatggaaagaagcagcttcgagaagaatcccatcgactttctggaagccaagggctacaaagaagtgaaaaaggacctgatcatcaagctgcctaagtactccctgttcgagctggaaaacggccggaagagaatgctggcctctgccggcgaactgcagaagggaaacgaactggccctgccctccaaatatgtgaacttcctgtacctggccagccactatgagaagctgaagggctcccccgaggataatgagcagaaacagctgtttgtggaacagcacaagcactacctggacgagatcatcgagcagatcagcgagttctccaagagagtgatcctggccgacgctaatctggacaaagtgctgtccgcctacaacaagcaccgggataagcccatcagagagcaggccgagaatatcatccacctgtttaccctgaccaatctgggagcccctgccgccttcaagtactttgacaccaccatcgaccggaagaggtacaccagcaccaaagaggtgctggacgccaccctgatccaccagagcatcaccggcctgtacgagacacggatcgacctgtctcagctgggaggtgactccggcggatctgaggccgctgccaaagaggccgccgccaaggaagccgccgccaaggaagccgccgccaaggaggccgccgccaaggaagctgcagccaaggaggccgctgccaaggaggccgctgctaaaagcggcggcagcaccctgaacatcgaggacgagtacaggctgcacgagaccagcaaggagcccgacgtgagcctgggcagcacctggctgagcgatttccctcaggcttgggccgagaccggcggcatgggcctggccgtgcggcaggcccccctgattatccccctgaaggccaccagcacccccgtgagcatcaagcagtacccaatgtcccaggaggccaggctgggcatcaagcctcacatccagaggctgctggaccagggcatcctggtgccatgccagtccccctggaacacccctctgctgcccgtgaagaagcctggcaccaacgactaccggcccgtgcaggacctgagagaagtgaacaagcgggtggaggacatccacccaaccgtgcccaacccttacaacctgctgtccggcctgccccccagccaccagtggtacaccgtgctggacctgaaggacgccttcttctgcctgagactgcaccccacctctcagcccctgttcgccttcgagtggcgcgaccccgagatgggcatcagcggccagctgacctggaccagactgccacagggctttaagaatagcccaaccctgtttaacgaggccctgcacagggacctggccgacttcaggatccagcaccccgacctgattctgctgcagtacgtggacgacctgctgctggccgctaccagcgagctggactgccagcagggcaccagagccctgctgcagaccctgggcaacctgggctacagagccagcgccaagaaggcccagatctgtcagaagcaggtgaagtatctgggctacctgctgaaggaaggccagagatggctgaccgaggccagaaaggagactgtgatgggccagcccacccccaagacccccaggcagctgcgggagttcctgggcaaggccggcttttgcagactgtttatccctggcttcgccgagatggccgccccactgtaccctctgaccaagcctggcaccctgtttaactggggccccgaccagcagaaggcctaccaggagatcaagcaggccctgctgaccgcccccgccctgggcctgcccgacctgaccaagcctttcgagctgttcgtggacgagaagcagggatacgccaaaggcgtgctgacccagaagctgggcccctggcggaggcccgtggcctacctgagcaaaaaactggaccctgtggccgccggctggcccccatgcctgcggatggtggccgccatcgctgtgctgaccaaggacgccggcaagctgaccatgggccagcccctggtgatcctggcccctcacgccgtggaggctctggtgaagcagcctccagacaggtggctgtccaacgccaggatgacccactaccaggccctgctgctggacaccgaccgggtgcagttcggccctgtggtggccctgaaccccgccaccctgctgcctctgccagaggagggcctgcagcacaactgcctggacatcctggccgaggcccacggcaccaggcccgacctgaccgaccagcccctgcctgacgccgaccacacctggtacaccgacggcagctccctgctgcaggagggccagaggaaggccggcgccgccgtgaccaccgagaccgaggtgatctgggccaaagccctgcctgccggcacctccgcccagcgggccgagctgatcgccctgacccaggccctgaagatggctgagggcaagaagctgaacgtgtacaccgattccagatacgccttcgccaccgcccacatccacggcgagatctacagaagaaggggctggctgacctccgagggcaaggagatcaagaacaaggacgagattctggccctgctgaaggccctgttcctgcctaagagactgagcatcatccactgtcccggccaccagaagggccacagcgccgaggccagaggcaatagaatggccgaccaggccgccagaaaggccgccatcaccgagacccccgacaccagcaccctgctgatcgagaacagcagccccagcggcggctccaaacgcaccgccgacgggagcgagttcgagcccaagaagaagaggaaagtc

SEQ ID NO: 119 - RNA, 6396 nt, synthetic construct
  misc_feature 1..6396: note = Description of Artificial Sequence: Synthetic polynucleotide
  source 1..6396: mol_type = other RNA
atgaaacggacagccgacggaagcgagttcgagtcaccaaagaagaagcggaaagtcgacaagaagtacagcatcggcctggacatcggcaccaactctgtgggctgggccgtgatcaccgacgagtacaaggtgcccagcaagaaattcaaggtgctgggcaacaccgaccggcacagcatcaagaagaacctgatcggagccctgctgttcgacagcggcgaaacagccgaggccacccggctgaagagaaccgccagaagaagatacaccagacggaagaaccggatctgctatctgcaagagatcttcagcaacgagatggccaaggtggacgacagcttcttccacagactggaagagtccttcctggtggaagaggataagaagcacgagcggcaccccatcttcggcaacatcgtggacgaggtggcctaccacgagaagtaccccaccatctaccacctgagaaagaaactggtggacagcaccgacaaggccgacctgcggctgatctatctggccctggcccacatgatcaagttccggggccacttcctgatcgagggcgacctgaaccccgacaacagcgacgtggacaagctgttcatccagctggtgcagacctacaaccagctgttcgaggaaaaccccatcaacgccagcggcgtggacgccaaggccatcctgtctgccagactgagcaagagcagacggctggaaaatctgatcgcccagctgcccggcgagaagaagaatggcctgttcggaaacctgattgccctgagcctgggcctgacccccaacttcaagagcaacttcgacctggccgaggatgccaaactgcagctgagcaaggacacctacgacgacgacctggacaacctgctggcccagatcggcgaccagtacgccgacctgtttctggccgccaagaacctgtccgacgccatcctgctgagcgacatcctgagagtgaacaccgagatcaccaaggcccccctgagcgcctctatgatcaagagatacgacgagcaccaccaggacctgaccctgctgaaagctctcgtgcggcagcagctgcctgagaagtacaaagagattttcttcgaccagagcaagaacggctacgccggctacattgacggcggagccagccaggaagagttctacaagttcatcaagcccatcctggaaaagatggacggcaccgaggaactgctcgtgaagctgaacagagaggacctgctgcggaagcagcggaccttcgacaacggcagcatcccccaccagatccacctgggagagctgcacgccattctgcggcggcaggaagatttttacccattcctgaaggacaaccgggaaaagatcgagaagatcctgaccttccgcatcccctactacgtgggccctctggccaggggaaacagcagattcgcctggatgaccagaaagagcgaggaaaccatcaccccctggaacttcgaggaagtggtggacaagggcgcttccgcccagagcttcatcgagcggatgaccaacttcgataagaacctgcccaacgagaaggtgctgcccaagcacagcctgctgtacgagtacttcaccgtgtataacgagctgaccaaagtgaaatacgtgaccgagggaatgagaaagcccgccttcctgagcggcgagcagaaaaaggccatcgtggacctgctgttcaagaccaaccggaaagtgaccgtgaagcagctgaaagaggactacttcaagaaaatcgagtgcttcgactccgtggaaatctccggcgtggaagatcggttcaacgcctccctgggcacataccacgatctgctgaaaattatcaaggacaaggacttcctggacaatgaggaaaacgaggacattctggaagatatcgtgctgaccctgacactgtttgaggacagagagatgatcgaggaacggctgaaaacctatgcccacctgttcgacgacaaagtgatgaagcagctgaagcggcggagatacaccggctggggcaggctgagccggaagctgatcaacggcatccgggacaagcagtccggcaagacaatcctggatttcctgaagtccgacggcttcgccaacagaaacttcatgcagctgatccacgacgacagcctgacctttaaagaggacatccagaaagcccaggtgtccggccagggcgatagcctgcacgagcacattgccaatctggccggcagccccgccattaagaagggcatcctgcagacagtgaaggtggtggacgagctcgtgaaagtgatgggccggcacaagcccgagaacatcgtgatcgaaatggccagagagaaccagaccacccagaagggacagaagaacagccgcgagagaatgaagcggatcgaagagggcatcaaagagctgggcagccagatcctgaaagaacaccccgtggaaaacacccagctgcagaacgagaagctgtacctgtactacctgcagaatgggcgggatatgtacgtggaccaggaactggacatcaaccggctgtccgactacgatgtggacgctatcgtgcctcagagctttctgaaggacgactccatcgacaacaaggtgctgaccagaagcgacaagaaccggggcaagagcgacaacgtgccctccgaagaggtcgtgaagaagatgaagaactactggcggcagctgctgaacgccaagctgattacccagagaaagttcgacaatctgaccaaggccgagagaggcggcctgagcgaactggataaggccggcttcatcaagagacagctggtggaaacccggcagatcacaaagcacgtggcacagatcctggactcccggatgaacactaagtacgacgagaatgacaagctgatccgggaagtgaaagtgatcaccctgaagtccaagctggtgtccgatttccggaaggatttccagttttacaaagtgcgcgagatcaacaactaccaccacgcccacgacgcctacctgaacgccgtcgtgggaaccgccctgatcaaaaagtaccctaagctggaaagcgagttcgtgtacggcgactacaaggtgtacgacgtgcggaagatgatcgccaagagcgagcaggaaatcggcaaggctaccgccaagtacttcttctacagcaacatcatgaactttttcaagaccgagattaccctggccaacggcgagatccggaagcggcctctgatcgagacaaacggcgaaaccggggagatcgtgtgggataagggccgggattttgccaccgtgcggaaagtgctgagcatgccccaagtgaatatcgtgaaaaagaccgaggtgcagacaggcggcttcagcaaagagtctatcctgcccaagaggaacagcgataagctgatcgccagaaagaaggactgggaccctaagaagtacggcggcttcgacagccccaccgtggcctattctgtgctggtggtggccaaagtggaaaagggcaagtccaagaaactgaagagtgtgaaagagctgctggggatcaccatcatggaaagaagcagcttcgagaagaatcccatcgactttctggaagccaagggctacaaagaagtgaaaaaggacctgatcatcaagctgcctaagtactccctgttcgagctggaaaacggccggaagagaatgctggcctctgccggcgaactgcagaagggaaacgaactggccctgccctccaaatatgtgaacttcctgtacctggccagccactatgagaagctgaagggctcccccgaggataatgagcagaaacagctgtttgtggaacagcacaagcactacctggacgagatcatcgagcagatcagcgagttctccaagagagtgatcctggccgacgctaatctggacaaagtgctgtccgcctacaacaagcaccgggataagcccatcagagagcaggccgagaatatcatccacctgtttaccctgaccaatctgggagcccctgccgccttcaagtactttgacaccaccatcgaccggaagaggtacaccagcaccaaagaggtgctggacgccaccctgatccaccagagcatcaccggcctgtacgagacacggatcgacctgtctcagctgggaggtgactccggcggatctgaggccgctgccaaagaggccgccgccaaggaagccgccgccaaggaagccgccgccaaggaggccgccgccaaggaagctgcagccaaggaggccgctgccaaggaggccgctgctaaaagcggcggcagcaccctgaacatcgaggacgagtacaggctgcacgagaccagcaaggagcccgacgtgagcctgggcagcacctggctgagcgatttccctcaggcttgggccgagaccggcggcatgggcctggccgtgcggcaggcccccctgattatccccctgaaggccaccagcacccccgtgagcatcaagcagtacccaatgtcccaggaggccaggctgggcatcaagcctcacatccagaggctgctggaccagggcatcctggtgccatgccagtccccctggaacacccctctgctgcccgtgaagaagcctggcaccaacgactaccggcccgtgcaggacctgagagaagtgaacaagcgggtggaggacatccacccaaccgtgcccaacccttacaacctgctgtccggcctgccccccagccaccagtggtacaccgtgctggacctgaaggacgccttcttctgcctgagactgcaccccacctctcagcccctgttcgccttcgagtggcgcgaccccgagatgggcatcagcggccagctgacctggaccagactgccacagggctttaagaatagcccaaccctgtttaacgaggccctgcacagggacctggccgacttcaggatccagcaccccgacctgattctgctgcagtacgtggacgacctgctgctggccgctaccagcgagctggactgccagcagggcaccagagccctgctgcagaccctgggcaacctgggctacagagccagcgccaagaaggcccagatctgtcagaagcaggtgaagtatctgggctacctgctgaaggaaggccagagatggctgaccgaggccagaaaggagactgtgatgggccagcccacccccaagacccccaggcagctgcgggagttcctgggcaaggccggcttttgcagactgtttatccctggcttcgccgagatggccgccccactgtaccctctgaccaagcctggcaccctgtttaactggggccccgaccagcagaaggcctaccaggagatcaagcaggccctgctgaccgcccccgccctgggcctgcccgacctgaccaagcctttcgagctgttcgtggacgagaagcagggatacgccaaaggcgtgctgacccagaagctgggcccctggcggaggcccgtggcctacctgagcaaaaaactggaccctgtggccgccggctggcccccatgcctgcggatggtggccgccatcgctgtgctgaccaaggacgccggcaagctgaccatgggccagcccctggtgatcctggcccctcacgccgtggaggctctggtgaagcagcctccagacaggtggctgtccaacgccaggatgacccactaccaggccctgctgctggacaccgaccgggtgcagttcggccctgtggtggccctgaaccccgccaccctgctgcctctgccagaggagggcctgcagcacaactgcctggacatcctggccgaggcccacggcaccaggcccgacctgaccgaccagcccctgcctgacgccgaccacacctggtacaccgacggcagctccctgctgcaggagggccagaggaaggccggcgccgccgtgaccaccgagaccgaggtgatctgggccaaagccctgcctgccggcacctccgcccagcgggccgagctgatcgccctgacccaggccctgaagatggctgagggcaagaagctgaacgtgtacaccgattccagatacgccttcgccaccgcccacatccacggcgagatctacagaagaaggggctggctgacctccgagggcaaggagatcaagaacaaggacgagattctggccctgctgaaggccctgttcctgcctaagagactgagcatcatccactgtcccggccaccagaagggccacagcgccgaggccagaggcaatagaatggccgaccaggccgccagaaaggccgccatcaccgagacccccgacaccagcaccctgctgatcgagaacagcagccccagcggcggctccaaacgcaccgccgacgggagcgagttcgagcccaagaagaagaggaaagtc

SEQ ID NO: 120 - DNA, 6276 bp, synthetic construct
  misc_feature 1..6276: note = Description of Artificial Sequence: Synthetic polynucleotide
  source 1..6276: mol_type = other DNA
gacaagaagtacagcatcggcctggacatcggcaccaactctgtgggctgggccgtgatcaccgacgagtacaaggtgcccagcaagaaattcaaggtgctgggcaacaccgaccggcacagcatcaagaagaacctgatcggagccctgctgttcgacagcggcgaaacagccgaggccacccggctgaagagaaccgccagaagaagatacaccagacggaagaaccggatctgctatctgcaagagatcttcagcaacgagatggccaaggtggacgacagcttcttccacagactggaagagtccttcctggtggaagaggataagaagcacgagcggcaccccatcttcggcaacatcgtggacgaggtggcctaccacgagaagtaccccaccatctaccacctgagaaagaaactggtggacagcaccgacaaggccgacctgcggctgatctatctggccctggcccacatgatcaagttccggggccacttcctgatcgagggcgacctgaaccccgacaacagcgacgtggacaagctgttcatccagctggtgcagacctacaaccagctgttcgaggaaaaccccatcaacgccagcggcgtggacgccaaggccatcctgtctgccagactgagcaagagcagacggctggaaaatctgatcgcccagctgcccggcgagaagaagaatggcctgttcggaaacctgattgccctgagcctgggcctgacccccaacttcaagagcaacttcgacctggccgaggatgccaaactgcagctgagcaaggacacctacgacgacgacctggacaacctgctggcccagatcggcgaccagtacgccgacctgtttctggccgccaagaacctgtccgacgccatcctgctgagcgacatcctgagagtgaacaccgagatcaccaaggcccccctgagcgcctctatgatcaagagatacgacgagcaccaccaggacctgaccctgctgaaagctctcgtgcggcagcagctgcctgagaagtacaaagagattttcttcgaccagagcaagaacggctacgccggctacattgacggcggagccagccaggaagagttctacaagttcatcaagcccatcctggaaaagatggacggcaccgaggaactgctcgtgaagctgaacagagaggacctgctgcggaagcagcggaccttcgacaacggcagcatcccccaccagatccacctgggagagctgcacgccattctgcggcggcaggaagatttttacccattcctgaaggacaaccgggaaaagatcgagaagatcctgaccttccgcatcccctactacgtgggccctctggccaggggaaacagcagattcgcctggatgaccagaaagagcgaggaaaccatcaccccctggaacttcgaggaagtggtggacaagggcgcttccgcccagagcttcatcgagcggatgaccaacttcgataagaacctgcccaacgagaaggtgctgcccaagcacagcctgctgtacgagtacttcaccgtgtataacgagctgaccaaagtgaaatacgtgaccgagggaatgagaaagcccgccttcctgagcggcgagcagaaaaaggccatcgtggacctgctgttcaagaccaaccggaaagtgaccgtgaagcagctgaaagaggactacttcaagaaaatcgagtgcttcgactccgtggaaatctccggcgtggaagatcggttcaacgcctccctgggcacataccacgatctgctgaaaattatcaaggacaaggacttcctggacaatgaggaaaacgaggacattctggaagatatcgtgctgaccctgacactgtttgaggacagagagatgatcgaggaacggctgaaaacctatgcccacctgttcgacgacaaagtgatgaagcagctgaagcggcggagatacaccggctggggcaggctgagccggaagctgatcaacggcatccgggacaagcagtccggcaagacaatcctggatttcctgaagtccgacggcttcgccaacagaaacttcatgcagctgatccacgacgacagcctgacctttaaagaggacatccagaaagcccaggtgtccggccagggcgatagcctgcacgagcacattgccaatctggccggcagccccgccattaagaagggcatcctgcagacagtgaaggtggtggacgagctcgtgaaagtgatgggccggcacaagcccgagaacatcgtgatcgaaatggccagagagaaccagaccacccagaagggacagaagaacagccgcgagagaatgaagcggatcgaagagggcatcaaagagctgggcagccagatcctgaaagaacaccccgtggaaaacacccagctgcagaacgagaagctgtacctgtactacctgcagaatgggcgggatatgtacgtggaccaggaactggacatcaaccggctgtccgactacgatgtggacgctatcgtgcctcagagctttctgaaggacgactccatcgacaacaaggtgctgaccagaagcgacaagaaccggggcaagagcgacaacgtgccctccgaagaggtcgtgaagaagatgaagaactactggcggcagctgctgaacgccaagctgattacccagagaaagttcgacaatctgaccaaggccgagagaggcggcctgagcgaactggataaggccggcttcatcaagagacagctggtggaaacccggcagatcacaaagcacgtggcacagatcctggactcccggatgaacactaagtacgacgagaatgacaagctgatccgggaagtgaaagtgatcaccctgaagtccaagctggtgtccgatttccggaaggatttccagttttacaaagtgcgcgagatcaacaactaccaccacgcccacgacgcctacctgaacgccgtcgtgggaaccgccctgatcaaaaagtaccctaagctggaaagcgagttcgtgtacggcgactacaaggtgtacgacgtgcggaagatgatcgccaagagcgagcaggaaatcggcaaggctaccgccaagtacttcttctacagcaacatcatgaactttttcaagaccgagattaccctggccaacggcgagatccggaagcggcctctgatcgagacaaacggcgaaaccggggagatcgtgtgggataagggccgggattttgccaccgtgcggaaagtgctgagcatgccccaagtgaatatcgtgaaaaagaccgaggtgcagacaggcggcttcagcaaagagtctatcctgcccaagaggaacagcgataagctgatcgccagaaagaaggactgggaccctaagaagtacggcggcttcgacagccccaccgtggcctattctgtgctggtggtggccaaagtggaaaagggcaagtccaagaaactgaagagtgtgaaagagctgctggggatcaccatcatggaaagaagcagcttcgagaagaatcccatcgactttctggaagccaagggctacaaagaagtgaaaaaggacctgatcatcaagctgcctaagtactccctgttcgagctggaaaacggccggaagagaatgctggcctctgccggcgaactgcagaagggaaacgaactggccctgccctccaaatatgtgaacttcctgtacctggccagccactatgagaagctgaagggctcccccgaggataatgagcagaaacagctgtttgtggaacagcacaagcactacctggacgagatcatcgagcagatcagcgagttctccaagagagtgatcctggccgacgctaatctggacaaagtgctgtccgcctacaacaagcaccgggataagcccatcagagagcaggccgagaatatcatccacctgtttaccctgaccaatctgggagcccctgccgccttcaagtactttgacaccaccatcgaccggaagaggtacaccagcaccaaagaggtgctggacgccaccctgatccaccagagcatcaccggcctgtacgagacacggatcgacctgtctcagctgggaggtgactccggcggatctgaggccgctgccaaagaggccgccgccaaggaagccgccgccaaggaagccgccgccaaggaggccgccgccaaggaagctgcagccaaggaggccgctgccaaggaggccgctgctaaaagcggcggcagcaccctgaacatcgaggacgagtacaggctgcacgagaccagcaaggagcccgacgtgagcctgggcagcacctggctgagcgatttccctcaggcttgggccgagaccggcggcatgggcctggccgtgcggcaggcccccctgattatccccctgaaggccaccagcacccccgtgagcatcaagcagtacccaatgtcccaggaggccaggctgggcatcaagcctcacatccagaggctgctggaccagggcatcctggtgccatgccagtccccctggaacacccctctgctgcccgtgaagaagcctggcaccaacgactaccggcccgtgcaggacctgagagaagtgaacaagcgggtggaggacatccacccaaccgtgcccaacccttacaacctgctgtccggcctgccccccagccaccagtggtacaccgtgctggacctgaaggacgccttcttctgcctgagactgcaccccacctctcagcccctgttcgccttcgagtggcgcgaccccgagatgggcatcagcggccagctgacctggaccagactgccacagggctttaagaatagcccaaccctgtttaacgaggccctgcacagggacctggccgacttcaggatccagcaccccgacctgattctgctgcagtacgtggacgacctgctgctggccgctaccagcgagctggactgccagcagggcaccagagccctgctgcagaccctgggcaacctgggctacagagccagcgccaagaaggcccagatctgtcagaagcaggtgaagtatctgggctacctgctgaaggaaggccagagatggctgaccgaggccagaaaggagactgtgatgggccagcccacccccaagacccccaggcagctgcgggagttcctgggcaaggccggcttttgcagactgtttatccctggcttcgccgagatggccgccccactgtaccctctgaccaagcctggcaccctgtttaactggggccccgaccagcagaaggcctaccaggagatcaagcaggccctgctgaccgcccccgccctgggcctgcccgacctgaccaagcctttcgagctgttcgtggacgagaagcagggatacgccaaaggcgtgctgacccagaagctgggcccctggcggaggcccgtggcctacctgagcaaaaaactggaccctgtggccgccggctggcccccatgcctgcggatggtggccgccatcgctgtgctgaccaaggacgccggcaagctgaccatgggccagcccctggtgatcctggcccctcacgccgtggaggctctggtgaagcagcctccagacaggtggctgtccaacgccaggatgacccactaccaggccctgctgctggacaccgaccgggtgcagttcggccctgtggtggccctgaaccccgccaccctgctgcctctgccagaggagggcctgcagcacaactgcctggacatcctggccgaggcccacggcaccaggcccgacctgaccgaccagcccctgcctgacgccgaccacacctggtacaccgacggcagctccctgctgcaggagggccagaggaaggccggcgccgccgtgaccaccgagaccgaggtgatctgggccaaagccctgcctgccggcacctccgcccagcgggccgagctgatcgccctgacccaggccctgaagatggctgagggcaagaagctgaacgtgtacaccgattccagatacgccttcgccaccgcccacatccacggcgagatctacagaagaaggggctggctgacctccgagggcaaggagatcaagaacaaggacgagattctggccctgctgaaggccctgttcctgcctaagagactgagcatcatccactgtcccggccaccagaagggccacagcgccgaggccagaggcaatagaatggccgaccaggccgccagaaaggccgccatcaccgagacccccgacaccagcaccctgctgatcgagaacagcagcccc

SEQ ID NO: 121 - RNA, 6276 nt, synthetic construct
  misc_feature 1..6276: note = Description of Artificial Sequence: Synthetic polynucleotide
  source 1..6276: mol_type = other RNA
gacaagaagtacagcatcggcctggacatcggcaccaactctgtgggctgggccgtgatcaccgacgagtacaaggtgcccagcaagaaattcaaggtgctgggcaacaccgaccggcacagcatcaagaagaacctgatcggagccctgctgttcgacagcggcgaaacagccgaggccacccggctgaagagaaccgccagaagaagatacaccagacggaagaaccggatctgctatctgcaagagatcttcagcaacgagatggccaaggtggacgacagcttcttccacagactggaagagtccttcctggtggaagaggataagaagcacgagcggcaccccatcttcggcaacatcgtggacgaggtggcctaccacgagaagtaccccaccatctaccacctgagaaagaaactggtggacagcaccgacaaggccgacctgcggctgatctatctggccctggcccacatgatcaagttccggggccacttcctgatcgagggcgacctgaaccccgacaacagcgacgtggacaagctgttcatccagctggtgcagacctacaaccagctgttcgaggaaaaccccatcaacgccagcggcgtggacgccaaggccatcctgtctgccagactgagcaagagcagacggctggaaaatctgatcgcccagctgcccggcgagaagaagaatggcctgttcggaaacctgattgccctgagcctgggcctgacccccaacttcaagagcaacttcgacctggccgaggatgccaaactgcagctgagcaaggacacctacgacgacgacctggacaacctgctggcccagatcggcgaccagtacgccgacctgtttctggccgccaagaacctgtccgacgccatcctgctgagcgacatcctgagagtgaacaccgagatcaccaaggcccccctgagcgcctctatgatcaagagatacgacgagcaccaccaggacctgaccctgctgaaagctctcgtgcggcagcagctgcctgagaagtacaaagagattttcttcgaccagagcaagaacggctacgccggctacattgacggcggagccagccaggaagagttctacaagttcatcaagcccatcctggaaaagatggacggcaccgaggaactgctcgtgaagctgaacagagaggacctgctgcggaagcagcggaccttcgacaacggcagcatcccccaccagatccacctgggagagctgcacgccattctgcggcggcaggaagatttttacccattcctgaaggacaaccgggaaaagatcgagaagatcctgaccttccgcatcccctactacgtgggccctctggccaggggaaacagcagattcgcctggatgaccagaaagagcgaggaaaccatcaccccctggaacttcgaggaagtggtggacaagggcgcttccgcccagagcttcatcgagcggatgaccaacttcgataagaacctgcccaacgagaaggtgctgcccaagcacagcctgctgtacgagtacttcaccgtgtataacgagctgaccaaagtgaaatacgtgaccgagggaatgagaaagcccgccttcctgagcggcgagcagaaaaaggccatcgtggacctgctgttcaagaccaaccggaaagtgaccgtgaagcagctgaaagaggactacttcaagaaaatcgagtgcttcgactccgtggaaatctccggcgtggaagatcggttcaacgcctccctgggcacataccacgatctgctgaaaattatcaaggacaaggacttcctggacaatgaggaaaacgaggacattctggaagatatcgtgctgaccctgacactgtttgaggacagagagatgatcgaggaacggctgaaaacctatgcccacctgttcgacgacaaagtgatgaagcagctgaagcggcggagatacaccggctggggcaggctgagccggaagctgatcaacggcatccgggacaagcagtccggcaagacaatcctggatttcctgaagtccgacggcttcgccaacagaaacttcatgcagctgatccacgacgacagcctgacctttaaagaggacatccagaaagcccaggtgtccggccagggcgatagcctgcacgagcacattgccaatctggccggcagccccgccattaagaagggcatcctgcagacagtgaaggtggtggacgagctcgtgaaagtgatgggccggcacaagcccgagaacatcgtgatcgaaatggccagagagaaccagaccacccagaagggacagaagaacagccgcgagagaatgaagcggatcgaagagggcatcaaagagctgggcagccagatcctgaaagaacaccccgtggaaaacacccagctgcagaacgagaagctgtacctgtactacctgcagaatgggcgggatatgtacgtggaccaggaactggacatcaaccggctgtccgactacgatgtggacgctatcgtgcctcagagctttctgaaggacgactccatcgacaacaaggtgctgaccagaagcgacaagaaccggggcaagagcgacaacgtgccctccgaagaggtcgtgaagaagatgaagaactactggcggcagctgctgaacgccaagctgattacccagagaaagttcgacaatctgaccaaggccgagagaggcggcctgagcgaactggataaggccggcttcatcaagagacagctggtggaaacccggcagatcacaaagcacgtggcacagatcctggactcccggatgaacactaagtacgacgagaatgacaagctgatccgggaagtgaaagtgatcaccctgaagtccaagctggtgtccgatttccggaaggatttccagttttacaaagtgcgcgagatcaacaactaccaccacgcccacgacgcctacctgaacgccgtcgtgggaaccgccctgatcaaaaagtaccctaagctggaaagcgagttcgtgtacggcgactacaaggtgtacgacgtgcggaagatgatcgccaagagcgagcaggaaatcggcaaggctaccgccaagtacttcttctacagcaacatcatgaactttttcaagaccgagattaccctggccaacggcgagatccggaagcggcctctgatcgagacaaacggcgaaaccggggagatcgtgtgggataagggccgggattttgccaccgtgcggaaagtgctgagcatgccccaagtgaatatcgtgaaaaagaccgaggtgcagacaggcggcttcagcaaagagtctatcctgcccaagaggaacagcgataagctgatcgccagaaagaaggactgggaccctaagaagtacggcggcttcgacagccccaccgtggcctattctgtgctggtggtggccaaagtggaaaagggcaagtccaagaaactgaagagtgtgaaagagctgctggggatcaccatcatggaaagaagcagcttcgagaagaatcccatcgactttctggaagccaagggctacaaagaagtgaaaaaggacctgatcatcaagctgcctaagtactccctgttcgagctggaaaacggccggaagagaatgctggcctctgccggcgaactgcagaagggaaacgaactggccctgccctccaaatatgtgaacttcctgtacctggccagccactatgagaagctgaagggctcccccgaggataatgagcagaaacagctgtttgtggaacagcacaagcactacctggacgagatcatcgagcagatcagcgagttctccaagagagtgatcctggccgacgctaatctggacaaagtgctgtccgcctacaacaagcaccgggataagcccatcagagagcaggccgagaatatcatccacctgtttaccctgaccaatctgggagcccctgccgccttcaagtactttgacaccaccatcgaccggaagaggtacaccagcaccaaagaggtgctggacgccaccctgatccaccagagcatcaccggcctgtacgagacacggatcgacctgtctcagctgggaggtgactccggcggatctgaggccgctgccaaagaggccgccgccaaggaagccgccgccaaggaagccgccgccaaggaggccgccgccaaggaagctgcagccaaggaggccgctgccaaggaggccgctgctaaaagcggcggcagcaccctgaacatcgaggacgagtacaggctgcacgagaccagcaaggagcccgacgtgagcctgggcagcacctggctgagcgatttccctcaggcttgggccgagaccggcggcatgggcctggccgtgcggcaggcccccctgattatccccctgaaggccaccagcacccccgtgagcatcaagcagtacccaatgtcccaggaggccaggctgggcatcaagcctcacatccagaggctgctggaccagggcatcctggtgccatgccagtccccctggaacacccctctgctgcccgtgaagaagcctggcaccaacgactaccggcccgtgcaggacctgagagaagtgaacaagcgggtggaggacatccacccaaccgtgcccaacccttacaacctgctgtccggcctgccccccagccaccagtggtacaccgtgctggacctgaaggacgccttcttctgcctgagactgcaccccacctctcagcccctgttcgccttcgagtggcgcgaccccgagatgggcatcagcggccagctgacctggaccagactgccacagggctttaagaatagcccaaccctgtttaacgaggccctgcacagggacctggccgacttcaggatccagcaccccgacctgattctgctgcagtacgtggacgacctgctgctggccgctaccagcgagctggactgccagcagggcaccagagccctgctgcagaccctgggcaacctgggctacagagccagcgccaagaaggcccagatctgtcagaagcaggtgaagtatctgggctacctgctgaaggaaggccagagatggctgaccgaggccagaaaggagactgtgatgggccagcccacccccaagacccccaggcagctgcgggagttcctgggcaaggccggcttttgcagactgtttatccctggcttcgccgagatggccgccccactgtaccctctgaccaagcctggcaccctgtttaactggggccccgaccagcagaaggcctaccaggagatcaagcaggccctgctgaccgcccccgccctgggcctgcccgacctgaccaagcctttcgagctgttcgtggacgagaagcagggatacgccaaaggcgtgctgacccagaagctgggcccctggcggaggcccgtggcctacctgagcaaaaaactggaccctgtggccgccggctggcccccatgcctgcggatggtggccgccatcgctgtgctgaccaaggacgccggcaagctgaccatgggccagcccctggtgatcctggcccctcacgccgtggaggctctggtgaagcagcctccagacaggtggctgtccaacgccaggatgacccactaccaggccctgctgctggacaccgaccgggtgcagttcggccctgtggtggccctgaaccccgccaccctgctgcctctgccagaggagggcctgcagcacaactgcctggacatcctggccgaggcccacggcaccaggcccgacctgaccgaccagcccctgcctgacgccgaccacacctggtacaccgacggcagctccctgctgcaggagggccagaggaaggccggcgccgccgtgaccaccgagaccgaggtgatctgggccaaagccctgcctgccggcacctccgcccagcgggccgagctgatcgccctgacccaggccctgaagatggctgagggcaagaagctgaacgtgtacaccgattccagatacgccttcgccaccgcccacatccacggcgagatctacagaagaaggggctggctgacctccgagggcaaggagatcaagaacaaggacgagattctggccctgctgaaggccctgttcctgcctaagagactgagcatcatccactgtcccggccaccagaagggccacagcgccgaggccagaggcaatagaatggccgaccaggccgccagaaaggccgccatcaccgagacccccgacaccagcaccctgctgatcgagaacagcagcccc

SEQ ID NO: 122 - protein, 1919 aa, synthetic construct
  REGION 1..1919: note = Description of Artificial Sequence: Synthetic polypeptide
DKKYSIGLDIGTNSVGWAVITDEYKVPSKKFKVLGNTDRHSIKKNLIGALLFDSGETAEATRLKRTARRRYTRRKNRICYLQEIFSNEMAKVDDSFFHRLEESFLVEEDKKHERHPIFGNIVDEVAYHEKYPTIYHLRKKLVDSTDKADLRLIYLALAHMIKFRGHFLIEGDLNPDNSDVDKLFIQLVQTYNQLFEENPINASGVDAKAILSARLSKSRRLENLIAQLPGEKKNGLFGNLIALSLGLTPNFKSNFDLAEDAKLQLSKDTYDDDLDNLLAQIGDQYADLFLAAKNLSDAILLSDILRVNTEITKAPLSASMIKRYDEHHQDLTLLKALVRQQLPEKYKEIFFDQSKNGYAGYIDGGASQEEFYKFIKPILEKMDGTEELLVKLNREDLLRKQRTFDNGSIPHQIHLGELHAILRRQEDFYPFLKDNREKIEKILTFRIPYYVGPLARGNSRFAWMTRKSEETITPWNFEEVVDKGASAQSFIERMTNFDKNLPNEKVLPKHSLLYEYFTVYNELTKVKYVTEGMRKPAFLSGEQKKAIVDLLFKTNRKVTVKQLKEDYFKKIECFDSVEISGVEDRFNASLGTYHDLLKIIKDKDFLDNEENEDILEDIVLTLTLFEDREMIEERLKTYAHLFDDKVMKQLKRRRYTGWGRLSRKLINGIRDKQSGKTILDFLKSDGFANRNFMQLIHDDSLTFKEDIQKAQVSGQGDSLHEHIANLAGSPAIKKGILQTVKVVDELVKVMGRHKPENIVIEMARENQTTQKGQKNSRERMKRIEEGIKELGSQILKEHPVENTQLQNEKLYLYYLQNGRDMYVDQELDINRLSDYDVDAIVPQSFLKDDSIDNKVLTRSDKNRGKSDNVPSEEVVKKMKNYWRQLLNAKLITQRKFDNLTKAERGGLSELDKAGFIKRQLVETRQITKHVAQILDSRMNTKYDENDKLIREVKVITLKSKLVSDFRKDFQFYKVREINNYHHAHDAYLNAVVGTALIKKYPKLESEFVYGDYKVYDVRKMIAKSEQEIGKATAKYFFYSNIMNFFKTEITLANGEIRKRPLIETNGETGEIVWDKGRDFATVRKVLSMPQVNIVKKTEVQTGGFSKESILPKRNSDKLIARKKDWDPKKYGGFDSPTVAYSVLVVAKVEKGKSKKLKSVKELLGITIMERSSFEKNPIDFLEAKGYKEVKKDLIIKLPKYSLFELENGRKRMLASAGELQKGNELALPSKYVNFLYLASHYEKLKGSPEDNEQKQLFVEQHKHYLDEIIEQISEFSKRVILADANLDKVLSAYNKHRDKPIREQAENIIHLFTLTNLGAPAAFKYFDTTIDRKRYTSTKEVLDATLIHQSITGLYETRIDLSQLGGDSGGSEAAAKEAAAKEAAAKEAAAKEAAAKEAAAKEAAAKEAAAKSGGSTLNIEDEYRLHETSKEPDVSLGSTWLSDFPQAWAETGGMGLAVRQAPLIIPLKATSTPVSIKQYPMSQEARLGIKPHIQRLLDQGILVPCQSPWNTPLLPVKKPGTNDYRPVQDLREVNKRVEDIHPTVPNPYNLLSGLPPSHQWYTVLDLKDAFFCLRLHPTSQPLFAFEWRDPEMGISGQLTWTRLPQGFKNSPTLFNEALHRDLADFRIQHPDLILLQYVDDLLLAATSELDCQQGTRALLQTLGNLGYRASAKKAQICQKQVKYLGYLLKEGQRWLTEARKETVMGQPTPKTPRQLREFLGKAGFCRLFIPGFAEMAAPLYPLTKPGTLFNWGPDQQKAYQEIKQALLTAPALGLPDLTKPFELFVDEKQGYAKGVLTQKLGPWRRPVAYLSKKLDPVAAGWPPCLRMVAAIAVLTKDAGKLTMGQPLVILAPHAVEALVKQPPDRWLSNARMTHYQALLLDTDRVQFGPVVALNPATLLPLPEEGLQHNCLDILAEAHG

SEQ ID NO: 123 - DNA, 5757 bp, synthetic construct
  misc_feature 1..5757: note = Description of Artificial Sequence: Synthetic polynucleotide
  source 1..5757: mol_type = other DNA
gacaagaagtacagcatcggcctggacatcggcaccaactctgtgggctgggccgtgatcaccgacgagtacaaggtgcccagcaagaaattcaaggtgctgggcaacaccgaccggcacagcatcaagaagaacctgatcggagccctgctgttcgacagcggcgaaacagccgaggccacccggctgaagagaaccgccagaagaagatacaccagacggaagaaccggatctgctatctgcaagagatcttcagcaacgagatggccaaggtggacgacagcttcttccacagactggaagagtccttcctggtggaagaggataagaagcacgagcggcaccccatcttcggcaacatcgtggacgaggtggcctaccacgagaagtaccccaccatctaccacctgagaaagaaactggtggacagcaccgacaaggccgacctgcggctgatctatctggccctggcccacatgatcaagttccggggccacttcctgatcgagggcgacctgaaccccgacaacagcgacgtggacaagctgttcatccagctggtgcagacctacaaccagctgttcgaggaaaaccccatcaacgccagcggcgtggacgccaaggccatcctgtctgccagactgagcaagagcagacggctggaaaatctgatcgcccagctgcccggcgagaagaagaatggcctgttcggaaacctgattgccctgagcctgggcctgacccccaacttcaagagcaacttcgacctggccgaggatgccaaactgcagctgagcaaggacacctacgacgacgacctggacaacctgctggcccagatcggcgaccagtacgccgacctgtttctggccgccaagaacctgtccgacgccatcctgctgagcgacatcctgagagtgaacaccgagatcaccaaggcccccctgagcgcctctatgatcaagagatacgacgagcaccaccaggacctgaccctgctgaaagctctcgtgcggcagcagctgcctgagaagtacaaagagattttcttcgaccagagcaagaacggctacgccggctacattgacggcggagccagccaggaagagttctacaagttcatcaagcccatcctggaaaagatggacggcaccgaggaactgctcgtgaagctgaacagagaggacctgctgcggaagcagcggaccttcgacaacggcagcatcccccaccagatccacctgggagagctgcacgccattctgcggcggcaggaagatttttacccattcctgaaggacaaccgggaaaagatcgagaagatcctgaccttccgcatcccctactacgtgggccctctggccaggggaaacagcagattcgcctggatgaccagaaagagcgaggaaaccatcaccccctggaacttcgaggaagtggtggacaagggcgcttccgcccagagcttcatcgagcggatgaccaacttcgataagaacctgcccaacgagaaggtgctgcccaagcacagcctgctgtacgagtacttcaccgtgtataacgagctgaccaaagtgaaatacgtgaccgagggaatgagaaagcccgccttcctgagcggcgagcagaaaaaggccatcgtggacctgctgttcaagaccaaccggaaagtgaccgtgaagcagctgaaagaggactacttcaagaaaatcgagtgcttcgactccgtggaaatctccggcgtggaagatcggttcaacgcctccctgggcacataccacgatctgctgaaaattatcaaggacaaggacttcctggacaatgaggaaaacgaggacattctggaagatatcgtgctgaccctgacactgtttgaggacagagagatgatcgaggaacggctgaaaacctatgcccacctgttcgacgacaaagtgatgaagcagctgaagcggcggagatacaccggctggggcaggctgagccggaagctgatcaacggcatccgggacaagcagtccggcaagacaatcctggatttcctgaagtccgacggcttcgccaacagaaacttcatgcagctgatccacgacgacagcctgacctttaaagaggacatccagaaagcccaggtgtccggccagggcgatagcctgcacgagcacattgccaatctggccggcagccccgccattaagaagggcatcctgcagacagtgaaggtggtggacgagctcgtgaaagtgatgggccggcacaagcccgagaacatcgtgatcgaaatggccagagagaaccagaccacccagaagggacagaagaacagccgcgagagaatgaagcggatcgaagagggcatcaaagagctgggcagccagatcctgaaagaacaccccgtggaaaacacccagctgcagaacgagaagctgtacctgtactacctgcagaatgggcgggatatgtacgtggaccaggaactggacatcaaccggctgtccgactacgatgtggacgctatcgtgcctcagagctttctgaaggacgactccatcgacaacaaggtgctgaccagaagcgacaagaaccggggcaagagcgacaacgtgccctccgaagaggtcgtgaagaagatgaagaactactggcggcagctgctgaacgccaagctgattacccagagaaagttcgacaatctgaccaaggccgagagaggcggcctgagcgaactggataaggccggcttcatcaagagacagctggtggaaacccggcagatcacaaagcacgtggcacagatcctggactcccggatgaacactaagtacgacgagaatgacaagctgatccgggaagtgaaagtgatcaccctgaagtccaagctggtgtccgatttccggaaggatttccagttttacaaagtgcgcgagatcaacaactaccaccacgcccacgacgcctacctgaacgccgtcgtgggaaccgccctgatcaaaaagtaccctaagctggaaagcgagttcgtgtacggcgactacaaggtgtacgacgtgcggaagatgatcgccaagagcgagcaggaaatcggcaaggctaccgccaagtacttcttctacagcaacatcatgaactttttcaagaccgagattaccctggccaacggcgagatccggaagcggcctctgatcgagacaaacggcgaaaccggggagatcgtgtgggataagggccgggattttgccaccgtgcggaaagtgctgagcatgccccaagtgaatatcgtgaaaaagaccgaggtgcagacaggcggcttcagcaaagagtctatcctgcccaagaggaacagcgataagctgatcgccagaaagaaggactgggaccctaagaagtacggcggcttcgacagccccaccgtggcctattctgtgctggtggtggccaaagtggaaaagggcaagtccaagaaactgaagagtgtgaaagagctgctggggatcaccatcatggaaagaagcagcttcgagaagaatcccatcgactttctggaagccaagggctacaaagaagtgaaaaaggacctgatcatcaagctgcctaagtactccctgttcgagctggaaaacggccggaagagaatgctggcctctgccggcgaactgcagaagggaaacgaactggccctgccctccaaatatgtgaacttcctgtacctggccagccactatgagaagctgaagggctcccccgaggataatgagcagaaacagctgtttgtggaacagcacaagcactacctggacgagatcatcgagcagatcagcgagttctccaagagagtgatcctggccgacgctaatctggacaaagtgctgtccgcctacaacaagcaccgggataagcccatcagagagcaggccgagaatatcatccacctgtttaccctgaccaatctgggagcccctgccgccttcaagtactttgacaccaccatcgaccggaagaggtacaccagcaccaaagaggtgctggacgccaccctgatccaccagagcatcaccggcctgtacgagacacggatcgacctgtctcagctgggaggtgactccggcggatctgaggccgctgccaaagaggccgccgccaaggaagccgccgccaaggaagccgccgccaaggaggccgccgccaaggaagctgcagccaaggaggccgctgccaaggaggccgctgctaaaagcggcggcagcaccctgaacatcgaggacgagtacaggctgcacgagaccagcaaggagcccgacgtgagcctgggcagcacctggctgagcgatttccctcaggcttgggccgagaccggcggcatgggcctggccgtgcggcaggcccccctgattatccccctgaaggccaccagcacccccgtgagcatcaagcagtacccaatgtcccaggaggccaggctgggcatcaagcctcacatccagaggctgctggaccagggcatcctggtgccatgccagtccccctggaacacccctctgctgcccgtgaagaagcctggcaccaacgactaccggcccgtgcaggacctgagagaagtgaacaagcgggtggaggacatccacccaaccgtgcccaacccttacaacctgctgtccggcctgccccccagccaccagtggtacaccgtgctggacctgaaggacgccttcttctgcctgagactgcaccccacctctcagcccctgttcgccttcgagtggcgcgaccccgagatgggcatcagcggccagctgacctggaccagactgccacagggctttaagaatagcccaaccctgtttaacgaggccctgcacagggacctggccgacttcaggatccagcaccccgacctgattctgctgcagtacgtggacgacctgctgctggccgctaccagcgagctggactgccagcagggcaccagagccctgctgcagaccctgggcaacctgggctacagagccagcgccaagaaggcccagatctgtcagaagcaggtgaagtatctgggctacctgctgaaggaaggccagagatggctgaccgaggccagaaaggagactgtgatgggccagcccacccccaagacccccaggcagctgcgggagttcctgggcaaggccggcttttgcagactgtttatccctggcttcgccgagatggccgccccactgtaccctctgaccaagcctggcaccctgtttaactggggccccgaccagcagaaggcctaccaggagatcaagcaggccctgctgaccgcccccgccctgggcctgcccgacctgaccaagcctttcgagctgttcgtggacgagaagcagggatacgccaaaggcgtgctgacccagaagctgggcccctggcggaggcccgtggcctacctgagcaaaaaactggaccctgtggccgccggctggcccccatgcctgcggatggtggccgccatcgctgtgctgaccaaggacgccggcaagctgaccatgggccagcccctggtgatcctggcccctcacgccgtggaggctctggtgaagcagcctccagacaggtggctgtccaacgccaggatgacccactaccaggccctgctgctggacaccgaccgggtgcagttcggccctgtggtggccctgaaccccgccaccctgctgcctctgccagaggagggcctgcagcacaactgcctggacatcctggccgaggcccacggc

SEQ ID NO: 124 - RNA, 5757 nt, synthetic construct
  misc_feature 1..5757: note = Description of Artificial Sequence: Synthetic polynucleotide
  source 1..5757: mol_type = other RNA
gacaagaagtacagcatcggcctggacatcggcaccaactctgtgggctgggccgtgatcaccgacgagtacaaggtgcccagcaagaaattcaaggtgctgggcaacaccgaccggcacagcatcaagaagaacctgatcggagccctgctgttcgacagcggcgaaacagccgaggccacccggctgaagagaaccgccagaagaagatacaccagacggaagaaccggatctgctatctgcaagagatcttcagcaacgagatggccaaggtggacgacagcttcttccacagactggaagagtccttcctggtggaagaggataagaagcacgagcggcaccccatcttcggcaacatcgtggacgaggtggcctaccacgagaagtaccccaccatctaccacctgagaaagaaactggtggacagcaccgacaaggccgacctgcggctgatctatctggccctggcccacatgatcaagttccggggccacttcctgatcgagggcgacctgaaccccgacaacagcgacgtggacaagctgttcatccagctggtgcagacctacaaccagctgttcgaggaaaaccccatcaacgccagcggcgtggacgccaaggccatcctgtctgccagactgagcaagagcagacggctggaaaatctgatcgcccagctgcccggcgagaagaagaatggcctgttcggaaacctgattgccctgagcctgggcctgacccccaacttcaagagcaacttcgacctggccgaggatgccaaactgcagctgagcaaggacacctacgacgacgacctggacaacctgctggcccagatcggcgaccagtacgccgacctgtttctggccgccaagaacctgtccgacgccatcctgctgagcgacatcctgagagtgaacaccgagatcaccaaggcccccctgagcgcctctatgatcaagagatacgacgagcaccaccaggacctgaccctgctgaaagctctcgtgcggcagcagctgcctgagaagtacaaagagattttcttcgaccagagcaagaacggctacgccggctacattgacggcggagccagccaggaagagttctacaagttcatcaagcccatcctggaaaagatggacggcaccgaggaactgctcgtgaagctgaacagagaggacctgctgcggaagcagcggaccttcgacaacggcagcatcccccaccagatccacctgggagagctgcacgccattctgcggcggcaggaagatttttacccattcctgaaggacaaccgggaaaagatcgagaagatcctgaccttccgcatcccctactacgtgggccctctggccaggggaaacagcagattcgcctggatgaccagaaagagcgaggaaaccatcaccccctggaacttcgaggaagtggtggacaagggcgcttccgcccagagcttcatcgagcggatgaccaacttcgataagaacctgcccaacgagaaggtgctgcccaagcacagcctgctgtacgagtacttcaccgtgtataacgagctgaccaaagtgaaatacgtgaccgagggaatgagaaagcccgccttcctgagcggcgagcagaaaaaggccatcgtggacctgctgttcaagaccaaccggaaagtgaccgtgaagcagctgaaagaggactacttcaagaaaatcgagtgcttcgactccgtggaaatctccggcgtggaagatcggttcaacgcctccctgggcacataccacgatctgctgaaaattatcaaggacaaggacttcctggacaatgaggaaaacgaggacattctggaagatatcgtgctgaccctgacactgtttgaggacagagagatgatcgaggaacggctgaaaacctatgcccacctgttcgacgacaaagtgatgaagcagctgaagcggcggagatacaccggctggggcaggctgagccggaagctgatcaacggcatccgggacaagcagtccggcaagacaatcctggatttcctgaagtccgacggcttcgccaacagaaacttcatgcagctgatccacgacgacagcctgacctttaaagaggacatccagaaagcccaggtgtccggccagggcgatagcctgcacgagcacattgccaatctggccggcagccccgccattaagaagggcatcctgcagacagtgaaggtggtggacgagctcgtgaaagtgatgggccggcacaagcccgagaacatcgtgatcgaaatggccagagagaaccagaccacccagaagggacagaagaacagccgcgagagaatgaagcggatcgaagagggcatcaaagagctgggcagccagatcctgaaagaacaccccgtggaaaacacccagctgcagaacgagaagctgtacctgtactacctgcagaatgggcgggatatgtacgtggaccaggaactggacatcaaccggctgtccgactacgatgtggacgctatcgtgcctcagagctttctgaaggacgactccatcgacaacaaggtgctgaccagaagcgacaagaaccggggcaagagcgacaacgtgccctccgaagaggtcgtgaagaagatgaagaactactggcggcagctgctgaacgccaagctgattacccagagaaagttcgacaatctgaccaaggccgagagaggcggcctgagcgaactggataaggccggcttcatcaagagacagctggtggaaacccggcagatcacaaagcacgtggcacagatcctggactcccggatgaacactaagtacgacgagaatgacaagctgatccgggaagtgaaagtgatcaccctgaagtccaagctggtgtccgatttccggaaggatttccagttttacaaagtgcgcgagatcaacaactaccaccacgcccacgacgcctacctgaacgccgtcgtgggaaccgccctgatcaaaaagtaccctaagctggaaagcgagttcgtgtacggcgactacaaggtgtacgacgtgcggaagatgatcgccaagagcgagcaggaaatcggcaaggctaccgccaagtacttcttctacagcaacatcatgaactttttcaagaccgagattaccctggccaacggcgagatccggaagcggcctctgatcgagacaaacggcgaaaccggggagatcgtgtgggataagggccgggattttgccaccgtgcggaaagtgctgagcatgccccaagtgaatatcgtgaaaaagaccgaggtgcagacaggcggcttcagcaaagagtctatcctgcccaagaggaacagcgataagctgatcgccagaaagaaggactgggaccctaagaagtacggcggcttcgacagccccaccgtggcctattctgtgctggtggtggccaaagtggaaaagggcaagtccaagaaactgaagagtgtgaaagagctgctggggatcaccatcatggaaagaagcagcttcgagaagaatcccatcgactttctggaagccaagggctacaaagaagtgaaaaaggacctgatcatcaagctgcctaagtactccctgttcgagctggaaaacggccggaagagaatgctggcctctgccggcgaactgcagaagggaaacgaactggccctgccctccaaatatgtgaacttcctgtacctggccagccactatgagaagctgaagggctcccccgaggataatgagcagaaacagctgtttgtggaacagcacaagcactacctggacgagatcatcgagcagatcagcgagttctccaagagagtgatcctggccgacgctaatctggacaaagtgctgtccgcctacaacaagcaccgggataagcccatcagagagcaggccgagaatatcatccacctgtttaccctgaccaatctgggagcccctgccgccttcaagtactttgacaccaccatcgaccggaagaggtacaccagcaccaaagaggtgctggacgccaccctgatccaccagagcatcaccggcctgtacgagacacggatcgacctgtctcagctgggaggtgactccggcggatctgaggccgctgccaaagaggccgccgccaaggaagccgccgccaaggaagccgccgccaaggaggccgccgccaaggaagctgcagccaaggaggccgctgccaaggaggccgctgctaaaagcggcggcagcaccctgaacatcgaggacgagtacaggctgcacgagaccagcaaggagcccgacgtgagcctgggcagcacctggctgagcgatttccctcaggcttgggccgagaccggcggcatgggcctggccgtgcggcaggcccccctgattatccccctgaaggccaccagcacccccgtgagcatcaagcagtacccaatgtcccaggaggccaggctgggcatcaagcctcacatccagaggctgctggaccagggcatcctggtgccatgccagtccccctggaacacccctctgctgcccgtgaagaagcctggcaccaacgactaccggcccgtgcaggacctgagagaagtgaacaagcgggtggaggacatccacccaaccgtgcccaacccttacaacctgctgtccggcctgccccccagccaccagtggtacaccgtgctggacctgaaggacgccttcttctgcctgagactgcaccccacctctcagcccctgttcgccttcgagtggcgcgaccccgagatgggcatcagcggccagctgacctggaccagactgccacagggctttaagaatagcccaaccctgtttaacgaggccctgcacagggacctggccgacttcaggatccagcaccccgacctgattctgctgcagtacgtggacgacctgctgctggccgctaccagcgagctggactgccagcagggcaccagagccctgctgcagaccctgggcaacctgggctacagagccagcgccaagaaggcccagatctgtcagaagcaggtgaagtatctgggctacctgctgaaggaaggccagagatggctgaccgaggccagaaaggagactgtgatgggccagcccacccccaagacccccaggcagctgcgggagttcctgggcaaggccggcttttgcagactgtttatccctggcttcgccgagatggccgccccactgtaccctctgaccaagcctggcaccctgtttaactggggccccgaccagcagaaggcctaccaggagatcaagcaggccctgctgaccgcccccgccctgggcctgcccgacctgaccaagcctttcgagctgttcgtggacgagaagcagggatacgccaaaggcgtgctgacccagaagctgggcccctggcggaggcccgtggcctacctgagcaaaaaactggaccctgtggccgccggctggcccccatgcctgcggatggtggccgccatcgctgtgctgaccaaggacgccggcaagctgaccatgggccagcccctggtgatcctggcccctcacgccgtggaggctctggtgaagcagcctccagacaggtggctgtccaacgccaggatgacccactaccaggccctgctgctggacaccgaccgggtgcagttcggccctgtggtggccctgaaccccgccaccctgctgcctctgccagaggagggcctgcagcacaactgcctggacatcctggccgaggcccacggc

SEQ ID NO: 125 - protein, 2062 aa, synthetic construct
  REGION 1..2062: note = Description of Artificial Sequence: Synthetic polypeptide
DKKYSIGLDIGTNSVGWAVITDEYKVPSKKFKVLGNTDRHSIKKNLIGALLFDSGETAEATRLKRTARRRYTRRKNRICYLQEIFSNEMAKVDDSFFHRLEESFLVEEDKKHERHPIFGNIVDEVAYHEKYPTIYHLRKKLVDSTDKADLRLIYLALAHMIKFRGHFLIEGDLNPDNSDVDKLFIQLVQTYNQLFEENPINASGVDAKAILSARLSKSRRLENLIAQLPGEKKNGLFGNLIALSLGLTPNFKSNFDLAEDAKLQLSKDTYDDDLDNLLAQIGDQYADLFLAAKNLSDAILLSDILRVNTEITKAPLSASMIKRYDEHHQDLTLLKALVRQQLPEKYKEIFFDQSKNGYAGYIDGGASQEEFYKFIKPILEKMDGTEELLVKLNREDLLRKQRTFDNGSIPHQIHLGELHAILRRQEDFYPFLKDNREKIEKILTFRIPYYVGPLARGNSRFAWMTRKSEETITPWNFEEVVDKGASAQSFIERMTNFDKNLPNEKVLPKHSLLYEYFTVYNELTKVKYVTEGMRKPAFLSGEQKKAIVDLLFKTNRKVTVKQLKEDYFKKIECFDSVEISGVEDRFNASLGTYHDLLKIIKDKDFLDNEENEDILEDIVLTLTLFEDREMIEERLKTYAHLFDDKVMKQLKRRRYTGWGRLSRKLINGIRDKQSGKTILDFLKSDGFANRNFMQLIHDDSLTFKEDIQKAQVSGQGDSLHEHIANLAGSPAIKKGILQTVKVVDELVKVMGRHKPENIVIEMARENQTTQKGQKNSRERMKRIEEGIKELGSQILKEHPVENTQLQNEKLYLYYLQNGRDMYVDQELDINRLSDYDVDAIVPQSFLKDDSIDNKVLTRSDKNRGKSDNVPSEEVVKKMKNYWRQLLNAKLITQRKFDNLTKAERGGLSELDKAGFIKRQLVETRQITKHVAQILDSRMNTKYDENDKLIREVKVITLKSKLVSDFRKDFQFYKVREINNYHHAHDAYLNAVVGTALIKKYPKLESEFVYGDYKVYDVRKMIAKSEQEIGKATAKYFFYSNIMNFFKTEITLANGEIRKRPLIETNGETGEIVWDKGRDFATVRKVLSMPQVNIVKKTEVQTGGFSKESILPKRNSDKLIARKKDWDPKKYGGFDSPTVAYSVLVVAKVEKGKSKKLKSVKELLGITIMERSSFEKNPIDFLEAKGYKEVKKDLIIKLPKYSLFELENGRKRMLASAGELQKGNELALPSKYVNFLYLASHYEKLKGSPEDNEQKQLFVEQHKHYLDEIIEQISEFSKRVILADANLDKVLSAYNKHRDKPIREQAENIIHLFTLTNLGAPAAFKYFDTTIDRKRYTSTKEVLDATLIHQSITGLYETRIDLSQLGGDSGGSEAAAKEAAAKSGGSTLNIEDEYRLHETSKEPDVSLGSTWLSDFPQAWAETGGMGLAVRQAPLIIPLKATSTPVSIKQYPMSQEARLGIKPHIQRLLDQGILVPCQSPWNTPLLPVKKPGTNDYRPVQDLREVNKRVEDIHPTVPNPYNLLSGLPPSHQWYTVLDLKDAFFCLRLHPTSQPLFAFEWRDPEMGISGQLTWTRLPQGFKNSPTLFNEALHRDLADFRIQHPDLILLQYVDDLLLAATSELDCQQGTRALLQTLGNLGYRASAKKAQICQKQVKYLGYLLKEGQRWLTEARKETVMGQPTPKTPRQLREFLGKAGFCRLFIPGFAEMAAPLYPLTKPGTLFNWGPDQQKAYQEIKQALLTAPALGLPDLTKPFELFVDEKQGYAKGVLTQKLGPWRRPVAYLSKKLDPVAAGWPPCLRMVAAIAVLTKDAGKLTMGQPLVILAPHAVEALVKQPPDRWLSNARMTHYQALLLDTDRVQFGPVVALNPATLLPLPEEGLQHNCLDILAEAHGTRPDLTDQPLPDADHTWYTDGSSLLQEGQRKAGAAVTTETEVIWAKALPAGTSAQRAELIALTQALKMAEGKKLNVYTDSRYAFATAHIHGEIYRRRGWLTSEGKEIKNKDEILALLKALFLPKRLSIIHCPGHQKGHSAEARGNRMADQAARKAAITETPDTSTLLIENSSP

SEQ ID NO: 126 - DNA, 6186 bp, synthetic construct
  misc_feature 1..6186: note = Description of Artificial Sequence: Synthetic polynucleotide
  source 1..6186: mol_type = other DNA
gacaagaagtacagcatcggcctggacatcggcaccaactctgtgggctgggccgtgatcaccgacgagtacaaggtgcccagcaagaaattcaaggtgctgggcaacaccgaccggcacagcatcaagaagaacctgatcggagccctgctgttcgacagcggcgaaacagccgaggccacccggctgaagagaaccgccagaagaagatacaccagacggaagaaccggatctgctatctgcaagagatcttcagcaacgagatggccaaggtggacgacagcttcttccacagactggaagagtccttcctggtggaagaggataagaagcacgagcggcaccccatcttcggcaacatcgtggacgaggtggcctaccacgagaagtaccccaccatctaccacctgagaaagaaactggtggacagcaccgacaaggccgacctgcggctgatctatctggccctggcccacatgatcaagttccggggccacttcctgatcgagggcgacctgaaccccgacaacagcgacgtggacaagctgttcatccagctggtgcagacctacaaccagctgttcgaggaaaaccccatcaacgccagcggcgtggacgccaaggccatcctgtctgccagactgagcaagagcagacggctggaaaatctgatcgcccagctgcccggcgagaagaagaatggcctgttcggaaacctgattgccctgagcctgggcctgacccccaacttcaagagcaacttcgacctggccgaggatgccaaactgcagctgagcaaggacacctacgacgacgacctggacaacctgctggcccagatcggcgaccagtacgccgacctgtttctggccgccaagaacctgtccgacgccatcctgctgagcgacatcctgagagtgaacaccgagatcaccaaggcccccctgagcgcctctatgatcaagagatacgacgagcaccaccaggacctgaccctgctgaaagctctcgtgcggcagcagctgcctgagaagtacaaagagattttcttcgaccagagcaagaacggctacgccggctacattgacggcggagccagccaggaagagttctacaagttcatcaagcccatcctggaaaagatggacggcaccgaggaactgctcgtgaagctgaacagagaggacctgctgcggaagcagcggaccttcgacaacggcagcatcccccaccagatccacctgggagagctgcacgccattctgcggcggcaggaagatttttacccattcctgaaggacaaccgggaaaagatcgagaagatcctgaccttccgcatcccctactacgtgggccctctggccaggggaaacagcagattcgcctggatgaccagaaagagcgaggaaaccatcaccccctggaacttcgaggaagtggtggacaagggcgcttccgcccagagcttcatcgagcggatgaccaacttcgataagaacctgcccaacgagaaggtgctgcccaagcacagcctgctgtacgagtacttcaccgtgtataacgagctgaccaaagtgaaatacgtgaccgagggaatgagaaagcccgccttcctgagcggcgagcagaaaaaggccatcgtggacctgctgttcaagaccaaccggaaagtgaccgtgaagcagctgaaagaggactacttcaagaaaatcgagtgcttcgactccgtggaaatctccggcgtggaagatcggttcaacgcctccctgggcacataccacgatctgctgaaaattatcaaggacaaggacttcctggacaatgaggaaaacgaggacattctggaagatatcgtgctgaccctgacactgtttgaggacagagagatgatcgaggaacggctgaaaacctatgcccacctgttcgacgacaaagtgatgaagcagctgaagcggcggagatacaccggctggggcaggctgagccggaagctgatcaacggcatccgggacaagcagtccggcaagacaatcctggatttcctgaagtccgacggcttcgccaacagaaacttcatgcagctgatccacgacgacagcctgacctttaaagaggacatccagaaagcccaggtgtccggccagggcgatagcctgcacgagcacattgccaatctggccggcagccccgccattaagaagggcatcctgcagacagtgaaggtggtggacgagctcgtgaaagtgatgggccggcacaagcccgagaacatcgtgatcgaaatggccagagagaaccagaccacccagaagggacagaagaacagccgcgagagaatgaagcggatcgaagagggcatcaaagagctgggcagccagatcctgaaagaacaccccgtggaaaacacccagctgcagaacgagaagctgtacctgtactacctgcagaatgggcgggatatgtacgtggaccaggaactggacatcaaccggctgtccgactacgatgtggacgctatcgtgcctcagagctttctgaaggacgactccatcgacaacaaggtgctgaccagaagcgacaagaaccggggcaagagcgacaacgtgccctccgaagaggtcgtgaagaagatgaagaactactggcggcagctgctgaacgccaagctgattacccagagaaagttcgacaatctgaccaaggccgagagaggcggcctgagcgaactggataaggccggcttcatcaagagacagctggtggaaacccggcagatcacaaagcacgtggcacagatcctggactcccggatgaacactaagtacgacgagaatgacaagctgatccgggaagtgaaagtgatcaccctgaagtccaagctggtgtccgatttccggaaggatttccagttttacaaagtgcgcgagatcaacaactaccaccacgcccacgacgcctacctgaacgccgtcgtgggaaccgccctgatcaaaaagtaccctaagctggaaagcgagttcgtgtacggcgactacaaggtgtacgacgtgcggaagatgatcgccaagagcgagcaggaaatcggcaaggctaccgccaagtacttcttctacagcaacatcatgaactttttcaagaccgagattaccctggccaacggcgagatccggaagcggcctctgatcgagacaaacggcgaaaccggggagatcgtgtgggataagggccgggattttgccaccgtgcggaaagtgctgagcatgccccaagtgaatatcgtgaaaaagaccgaggtgcagacaggcggcttcagcaaagagtctatcctgcccaagaggaacagcgataagctgatcgccagaaagaaggactgggaccctaagaagtacggcggcttcgacagccccaccgtggcctattctgtgctggtggtggccaaagtggaaaagggcaagtccaagaaactgaagagtgtgaaagagctgctggggatcaccatcatggaaagaagcagcttcgagaagaatcccatcgactttctggaagccaagggctacaaagaagtgaaaaaggacctgatcatcaagctgcctaagtactccctgttcgagctggaaaacggccggaagagaatgctggcctctgccggcgaactgcagaagggaaacgaactggccctgccctccaaatatgtgaacttcctgtacctggccagccactatgagaagctgaagggctcccccgaggataatgagcagaaacagctgtttgtggaacagcacaagcactacctggacgagatcatcgagcagatcagcgagttctccaagagagtgatcctggccgacgctaatctggacaaagtgctgtccgcctacaacaagcaccgggataagcccatcagagagcaggccgagaatatcatccacctgtttaccctgaccaatctgggagcccctgccgccttcaagtactttgacaccaccatcgaccggaagaggtacaccagcaccaaagaggtgctggacgccaccctgatccaccagagcatcaccggcctgtacgagacacggatcgacctgtctcagctgggaggtgactccggcggcagcgaggccgccgccaaggaagccgctgccaagagcggcggatctaccctgaacatcgaggacgagtacaggctgcacgagaccagcaaggagcccgacgtgagcctgggcagcacctggctgagcgatttccctcaggcttgggccgagaccggcggcatgggcctggccgtgcggcaggcccccctgattatccccctgaaggccaccagcacccccgtgagcatcaagcagtacccaatgtcccaggaggccaggctgggcatcaagcctcacatccagaggctgctggaccagggcatcctggtgccatgccagtccccctggaacacccctctgctgcccgtgaagaagcctggcaccaacgactaccggcccgtgcaggacctgagagaagtgaacaagcgggtggaggacatccacccaaccgtgcccaacccttacaacctgctgtccggcctgccccccagccaccagtggtacaccgtgctggacctgaaggacgccttcttctgcctgagactgcaccccacctctcagcccctgttcgccttcgagtggcgcgaccccgagatgggcatcagcggccagctgacctggaccagactgccacagggctttaagaatagcccaaccctgtttaacgaggccctgcacagggacctggccgacttcaggatccagcaccccgacctgattctgctgcagtacgtggacgacctgctgctggccgctaccagcgagctggactgccagcagggcaccagagccctgctgcagaccctgggcaacctgggctacagagccagcgccaagaaggcccagatctgtcagaagcaggtgaagtatctgggctacctgctgaaggaaggccagagatggctgaccgaggccagaaaggagactgtgatgggccagcccacccccaagacccccaggcagctgcgggagttcctgggcaaggccggcttttgcagactgtttatccctggcttcgccgagatggccgccccactgtaccctctgaccaagcctggcaccctgtttaactggggccccgaccagcagaaggcctaccaggagatcaagcaggccctgctgaccgcccccgccctgggcctgcccgacctgaccaagcctttcgagctgttcgtggacgagaagcagggatacgccaaaggcgtgctgacccagaagctgggcccctggcggaggcccgtggcctacctgagcaaaaaactggaccctgtggccgccggctggcccccatgcctgcggatggtggccgccatcgctgtgctgaccaaggacgccggcaagctgaccatgggccagcccctggtgatcctggcccctcacgccgtggaggctctggtgaagcagcctccagacaggtggctgtccaacgccaggatgacccactaccaggccctgctgctggacaccgaccgggtgcagttcggccctgtggtggccctgaaccccgccaccctgctgcctctgccagaggagggcctgcagcacaactgcctggacatcctggccgaggcccacggcaccaggcccgacctgaccgaccagcccctgcctgacgccgaccacacctggtacaccgacggcagctccctgctgcaggagggccagaggaaggccggcgccgccgtgaccaccgagaccgaggtgatctgggccaaagccctgcctgccggcacctccgcccagcgggccgagctgatcgccctgacccaggccctgaagatggctgagggcaagaagctgaacgtgtacaccgattccagatacgccttcgccaccgcccacatccacggcgagatctacagaagaaggggctggctgacctccgagggcaaggagatcaagaacaaggacgagattctggccctgctgaaggccctgttcctgcctaagagactgagcatcatccactgtcccggccaccagaagggccacagcgccgaggccagaggcaatagaatggccgaccaggccgccagaaaggccgccatcaccgagacccccgacaccagcaccctgctgatcgagaacagcagcccc

SEQ ID NO: 127 - RNA, 6186 nt, synthetic construct
  misc_feature 1..6186: note = Description of Artificial Sequence: Synthetic polynucleotide
  source 1..6186: mol_type = other RNA
gacaagaagtacagcatcggcctggacatcggcaccaactctgtgggctgggccgtgatcaccgacgagtacaaggtgcccagcaagaaattcaaggtgctgggcaacaccgaccggcacagcatcaagaagaacctgatcggagccctgctgttcgacagcggcgaaacagccgaggccacccggctgaagagaaccgccagaagaagatacaccagacggaagaaccggatctgctatctgcaagagatcttcagcaacgagatggccaaggtggacgacagcttcttccacagactggaagagtccttcctggtggaagaggataagaagcacgagcggcaccccatcttcggcaacatcgtggacgaggtggcctaccacgagaagtaccccaccatctaccacctgagaaagaaactggtggacagcaccgacaaggccgacctgcggctgatctatctggccctggcccacatgatcaagttccggggccacttcctgatcgagggcgacctgaaccccgacaacagcgacgtggacaagctgttcatccagctggtgcagacctacaaccagctgttcgaggaaaaccccatcaacgccagcggcgtggacgccaaggccatcctgtctgccagactgagcaagagcagacggctggaaaatctgatcgcccagctgcccggcgagaagaagaatggcctgttcggaaacctgattgccctgagcctgggcctgacccccaacttcaagagcaacttcgacctggccgaggatgccaaactgcagctgagcaaggacacctacgacgacgacctggacaacctgctggcccagatcggcgaccagtacgccgacctgtttctggccgccaagaacctgtccgacgccatcctgctgagcgacatcctgagagtgaacaccgagatcaccaaggcccccctgagcgcctctatgatcaagagatacgacgagcaccaccaggacctgaccctgctgaaagctctcgtgcggcagcagctgcctgagaagtacaaagagattttcttcgaccagagcaagaacggctacgccggctacattgacggcggagccagccaggaagagttctacaagttcatcaagcccatcctggaaaagatggacggcaccgaggaactgctcgtgaagctgaacagagaggacctgctgcggaagcagcggaccttcgacaacggcagcatcccccaccagatccacctgggagagctgcacgccattctgcggcggcaggaagatttttacccattcctgaaggacaaccgggaaaagatcgagaagatcctgaccttccgcatcccctactacgtgggccctctggccaggggaaacagcagattcgcctggatgaccagaaagagcgaggaaaccatcaccccctggaacttcgaggaagtggtggacaagggcgcttccgcccagagcttcatcgagcggatgaccaacttcgataagaacctgcccaacgagaaggtgctgcccaagcacagcctgctgtacgagtacttcaccgtgtataacgagctgaccaaagtgaaatacgtgaccgagggaatgagaaagcccgccttcctgagcggcgagcagaaaaaggccatcgtggacctgctgttcaagaccaaccggaaagtgaccgtgaagcagctgaaagaggactacttcaagaaaatcgagtgcttcgactccgtggaaatctccggcgtggaagatcggttcaacgcctccctgggcacataccacgatctgctgaaaattatcaaggacaaggacttcctggacaatgaggaaaacgaggacattctggaagatatcgtgctgaccctgacactgtttgaggacagagagatgatcgaggaacggctgaaaacctatgcccacctgttcgacgacaaagtgatgaagcagctgaagcggcggagatacaccggctggggcaggctgagccggaagctgatcaacggcatccgggacaagcagtccggcaagacaatcctggatttcctgaagtccgacggcttcgccaacagaaacttcatgcagctgatccacgacgacagcctgacctttaaagaggacatccagaaagcccaggtgtccggccagggcgatagcctgcacgagcacattgccaatctggccggcagccccgccattaagaagggcatcctgcagacagtgaaggtggtggacgagctcgtgaaagtgatgggccggcacaagcccgagaacatcgtgatcgaaatggccagagagaaccagaccacccagaagggacagaagaacagccgcgagagaatgaagcggatcgaagagggcatcaaagagctgggcagccagatcctgaaagaacaccccgtggaaaacacccagctgcagaacgagaagctgtacctgtactacctgcagaatgggcgggatatgtacgtggaccaggaactggacatcaaccggctgtccgactacgatgtggacgctatcgtgcctcagagctttctgaaggacgactccatcgacaacaaggtgctgaccagaagcgacaagaaccggggcaagagcgacaacgtgccctccgaagaggtcgtgaagaagatgaagaactactggcggcagctgctgaacgccaagctgattacccagagaaagttcgacaatctgaccaaggccgagagaggcggcctgagcgaactggataaggccggcttcatcaagagacagctggtggaaacccggcagatcacaaagcacgtggcacagatcctggactcccggatgaacactaagtacgacgagaatgacaagctgatccgggaagtgaaagtgatcaccctgaagtccaagctggtgtccgatttccggaaggatttccagttttacaaagtgcgcgagatcaacaactaccaccacgcccacgacgcctacctgaacgccgtcgtgggaaccgccctgatcaaaaagtaccctaagctggaaagcgagttcgtgtacggcgactacaaggtgtacgacgtgcggaagatgatcgccaagagcgagcaggaaatcggcaaggctaccgccaagtacttcttctacagcaacatcatgaactttttcaagaccgagattaccctggccaacggcgagatccggaagcggcctctgatcgagacaaacggcgaaaccggggagatcgtgtgggataagggccgggattttgccaccgtgcggaaagtgctgagcatgccccaagtgaatatcgtgaaaaagaccgaggtgcagacaggcggcttcagcaaagagtctatcctgcccaagaggaacagcgataagctgatcgccagaaagaaggactgggaccctaagaagtacggcggcttcgacagccccaccgtggcctattctgtgctggtggtggccaaagtggaaaagggcaagtccaagaaactgaagagtgtgaaagagctgctggggatcaccatcatggaaagaagcagcttcgagaagaatcccatcgactttctggaagccaagggctacaaagaagtgaaaaaggacctgatcatcaagctgcctaagtactccctgttcgagctggaaaacggccggaagagaatgctggcctctgccggcgaactgcagaagggaaacgaactggccctgccctccaaatatgtgaacttcctgtacctggccagccactatgagaagctgaagggctcccccgaggataatgagcagaaacagctgtttgtggaacagcacaagcactacctggacgagatcatcgagcagatcagcgagttctccaagagagtgatcctggccgacgctaatctggacaaagtgctgtccgcctacaacaagcaccgggataagcccatcagagagcaggccgagaatatcatccacctgtttaccctgaccaatctgggagcccctgccgccttcaagtactttgacaccaccatcgaccggaagaggtacaccagcaccaaagaggtgctggacgccaccctgatccaccagagcatcaccggcctgtacgagacacggatcgacctgtctcagctgggaggtgactccggcggcagcgaggccgccgccaaggaagccgctgccaagagcggcggatctaccctgaacatcgaggacgagtacaggctgcacgagaccagcaaggagcccgacgtgagcctgggcagcacctggctgagcgatttccctcaggcttgggccgagaccggcggcatgggcctggccgtgcggcaggcccccctgattatccccctgaaggccaccagcacccccgtgagcatcaagcagtacccaatgtcccaggaggccaggctgggcatcaagcctcacatccagaggctgctggaccagggcatcctggtgccatgccagtccccctggaacacccctctgctgcccgtgaagaagcctggcaccaacgactaccggcccgtgcaggacctgagagaagtgaacaagcgggtggaggacatccacccaaccgtgcccaacccttacaacctgctgtccggcctgccccccagccaccagtggtacaccgtgctggacctgaaggacgccttcttctgcctgagactgcaccccacctctcagcccctgttcgccttcgagtggcgcgaccccgagatgggcatcagcggccagctgacctggaccagactgccacagggctttaagaatagcccaaccctgtttaacgaggccctgcacagggacctggccgacttcaggatccagcaccccgacctgattctgctgcagtacgtggacgacctgctgctggccgctaccagcgagctggactgccagcagggcaccagagccctgctgcagaccctgggcaacctgggctacagagccagcgccaagaaggcccagatctgtcagaagcaggtgaagtatctgggctacctgctgaaggaaggccagagatggctgaccgaggccagaaaggagactgtgatgggccagcccacccccaagacccccaggcagctgcgggagttcctgggcaaggccggcttttgcagactgtttatccctggcttcgccgagatggccgccccactgtaccctctgaccaagcctggcaccctgtttaactggggccccgaccagcagaaggcctaccaggagatcaagcaggccctgctgaccgcccccgccctgggcctgcccgacctgaccaagcctttcgagctgttcgtggacgagaagcagggatacgccaaaggcgtgctgacccagaagctgggcccctggcggaggcccgtggcctacctgagcaaaaaactggaccctgtggccgccggctggcccccatgcctgcggatggtggccgccatcgctgtgctgaccaaggacgccggcaagctgaccatgggccagcccctggtgatcctggcccctcacgccgtggaggctctggtgaagcagcctccagacaggtggctgtccaacgccaggatgacccactaccaggccctgctgctggacaccgaccgggtgcagttcggccctgtggtggccctgaaccccgccaccctgctgcctctgccagaggagggcctgcagcacaactgcctggacatcctggccgaggcccacggcaccaggcccgacctgaccgaccagcccctgcctgacgccgaccacacctggtacaccgacggcagctccctgctgcaggagggccagaggaaggccggcgccgccgtgaccaccgagaccgaggtgatctgggccaaagccctgcctgccggcacctccgcccagcgggccgagctgatcgccctgacccaggccctgaagatggctgagggcaagaagctgaacgtgtacaccgattccagatacgccttcgccaccgcccacatccacggcgagatctacagaagaaggggctggctgacctccgagggcaaggagatcaagaacaaggacgagattctggccctgctgaaggccctgttcctgcctaagagactgagcatcatccactgtcccggccaccagaagggccacagcgccgaggccagaggcaatagaatggccgaccaggccgccagaaaggccgccatcaccgagacccccgacaccagcaccctgctgatcgagaacagcagcccc

SEQ ID NO: 128 - protein, 1889 aa, synthetic construct
  REGION 1..1889: note = Description of Artificial Sequence: Synthetic polypeptide
DKKYSIGLDIGTNSVGWAVITDEYKVPSKKFKVLGNTDRHSIKKNLIGALLFDSGETAEATRLKRTARRRYTRRKNRICYLQEIFSNEMAKVDDSFFHRLEESFLVEEDKKHERHPIFGNIVDEVAYHEKYPTIYHLRKKLVDSTDKADLRLIYLALAHMIKFRGHFLIEGDLNPDNSDVDKLFIQLVQTYNQLFEENPINASGVDAKAILSARLSKSRRLENLIAQLPGEKKNGLFGNLIALSLGLTPNFKSNFDLAEDAKLQLSKDTYDDDLDNLLAQIGDQYADLFLAAKNLSDAILLSDILRVNTEITKAPLSASMIKRYDEHHQDLTLLKALVRQQLPEKYKEIFFDQSKNGYAGYIDGGASQEEFYKFIKPILEKMDGTEELLVKLNREDLLRKQRTFDNGSIPHQIHLGELHAILRRQEDFYPFLKDNREKIEKILTFRIPYYVGPLARGNSRFAWMTRKSEETITPWNFEEVVDKGASAQSFIERMTNFDKNLPNEKVLPKHSLLYEYFTVYNELTKVKYVTEGMRKPAFLSGEQKKAIVDLLFKTNRKVTVKQLKEDYFKKIECFDSVEISGVEDRFNASLGTYHDLLKIIKDKDFLDNEENEDILEDIVLTLTLFEDREMIEERLKTYAHLFDDKVMKQLKRRRYTGWGRLSRKLINGIRDKQSGKTILDFLKSDGFANRNFMQLIHDDSLTFKEDIQKAQVSGQGDSLHEHIANLAGSPAIKKGILQTVKVVDELVKVMGRHKPENIVIEMARENQTTQKGQKNSRERMKRIEEGIKELGSQILKEHPVENTQLQNEKLYLYYLQNGRDMYVDQELDINRLSDYDVDAIVPQSFLKDDSIDNKVLTRSDKNRGKSDNVPSEEVVKKMKNYWRQLLNAKLITQRKFDNLTKAERGGLSELDKAGFIKRQLVETRQITKHVAQILDSRMNTKYDENDKLIREVKVITLKSKLVSDFRKDFQFYKVREINNYHHAHDAYLNAVVGTALIKKYPKLESEFVYGDYKVYDVRKMIAKSEQEIGKATAKYFFYSNIMNFFKTEITLANGEIRKRPLIETNGETGEIVWDKGRDFATVRKVLSMPQVNIVKKTEVQTGGFSKESILPKRNSDKLIARKKDWDPKKYGGFDSPTVAYSVLVVAKVEKGKSKKLKSVKELLGITIMERSSFEKNPIDFLEAKGYKEVKKDLIIKLPKYSLFELENGRKRMLASAGELQKGNELALPSKYVNFLYLASHYEKLKGSPEDNEQKQLFVEQHKHYLDEIIEQISEFSKRVILADANLDKVLSAYNKHRDKPIREQAENIIHLFTLTNLGAPAAFKYFDTTIDRKRYTSTKEVLDATLIHQSITGLYETRIDLSQLGGDSGGSEAAAKEAAAKSGGSTLNIEDEYRLHETSKEPDVSLGSTWLSDFPQAWAETGGMGLAVRQAPLIIPLKATSTPVSIKQYPMSQEARLGIKPHIQRLLDQGILVPCQSPWNTPLLPVKKPGTNDYRPVQDLREVNKRVEDIHPTVPNPYNLLSGLPPSHQWYTVLDLKDAFFCLRLHPTSQPLFAFEWRDPEMGISGQLTWTRLPQGFKNSPTLFNEALHRDLADFRIQHPDLILLQYVDDLLLAATSELDCQQGTRALLQTLGNLGYRASAKKAQICQKQVKYLGYLLKEGQRWLTEARKETVMGQPTPKTPRQLREFLGKAGFCRLFIPGFAEMAAPLYPLTKPGTLFNWGPDQQKAYQEIKQALLTAPALGLPDLTKPFELFVDEKQGYAKGVLTQKLGPWRRPVAYLSKKLDPVAAGWPPCLRMVAAIAVLTKDAGKLTMGQPLVILAPHAVEALVKQPPDRWLSNARMTHYQALLLDTDRVQFGPVVALNPATLLPLPEEGLQHNCLDILAEAHG

SEQ ID NO: 129 - DNA, 5667 bp, synthetic construct
  misc_feature 1..5667: note = Description of Artificial Sequence: Synthetic polynucleotide
  source 1..5667: mol_type = other DNA
gacaagaagtacagcatcggcctggacatcggcaccaactctgtgggctgggccgtgatcaccgacgagtacaaggtgcccagcaagaaattcaaggtgctgggcaacaccgaccggcacagcatcaagaagaacctgatcggagccctgctgttcgacagcggcgaaacagccgaggccacccggctgaagagaaccgccagaagaagatacaccagacggaagaaccggatctgctatctgcaagagatcttcagcaacgagatggccaaggtggacgacagcttcttccacagactggaagagtccttcctggtggaagaggataagaagcacgagcggcaccccatcttcggcaacatcgtggacgaggtggcctaccacgagaagtaccccaccatctaccacctgagaaagaaactggtggacagcaccgacaaggccgacctgcggctgatctatctggccctggcccacatgatcaagttccggggccacttcctgatcgagggcgacctgaaccccgacaacagcgacgtggacaagctgttcatccagctggtgcagacctacaaccagctgttcgaggaaaaccccatcaacgccagcggcgtggacgccaaggccatcctgtctgccagactgagcaagagcagacggctggaaaatctgatcgcccagctgcccggcgagaagaagaatggcctgttcggaaacctgattgccctgagcctgggcctgacccccaacttcaagagcaacttcgacctggccgaggatgccaaactgcagctgagcaaggacacctacgacgacgacctggacaacctgctggcccagatcggcgaccagtacgccgacctgtttctggccgccaagaacctgtccgacgccatcctgctgagcgacatcctgagagtgaacaccgagatcaccaaggcccccctgagcgcctctatgatcaagagatacgacgagcaccaccaggacctgaccctgctgaaagctctcgtgcggcagcagctgcctgagaagtacaaagagattttcttcgaccagagcaagaacggctacgccggctacattgacggcggagccagccaggaagagttctacaagttcatcaagcccatcctggaaaagatggacggcaccgaggaactgctcgtgaagctgaacagagaggacctgctgcggaagcagcggaccttcgacaacggcagcatcccccaccagatccacctgggagagctgcacgccattctgcggcggcaggaagatttttacccattcctgaaggacaaccgggaaaagatcgagaagatcctgaccttccgcatcccctactacgtgggccctctggccaggggaaacagcagattcgcctggatgaccagaaagagcgaggaaaccatcaccccctggaacttcgaggaagtggtggacaagggcgcttccgcccagagcttcatcgagcggatgaccaacttcgataagaacctgcccaacgagaaggtgctgcccaagcacagcctgctgtacgagtacttcaccgtgtataacgagctgaccaaagtgaaatacgtgaccgagggaatgagaaagcccgccttcctgagcggcgagcagaaaaaggccatcgtggacctgctgttcaagaccaaccggaaagtgaccgtgaagcagctgaaagaggactacttcaagaaaatcgagtgcttcgactccgtggaaatctccggcgtggaagatcggttcaacgcctccctgggcacataccacgatctgctgaaaattatcaaggacaaggacttcctggacaatgaggaaaacgaggacattctggaagatatcgtgctgaccctgacactgtttgaggacagagagatgatcgaggaacggctgaaaacctatgcccacctgttcgacgacaaagtgatgaagcagctgaagcggcggagatacaccggctggggcaggctgagccggaagctgatcaacggcatccgggacaagcagtccggcaagacaatcctggatttcctgaagtccgacggcttcgccaacagaaacttcatgcagctgatccacgacgacagcctgacctttaaagaggacatccagaaagcccaggtgtccggccagggcgatagcctgcacgagcacattgccaatctggccggcagccccgccattaagaagggcatcctgcagacagtgaaggtggtggacgagctcgtgaaagtgatgggccggcacaagcccgagaacatcgtgatcgaaatggccagagagaaccagaccacccagaagggacagaagaacagccgcgagagaatgaagcggatcgaagagggcatcaaagagctgggcagccagatcctgaaagaacaccccgtggaaaacacccagctgcagaacgagaagctgtacctgtactacctgcagaatgggcgggatatgtacgtggaccaggaactggacatcaaccggctgtccgactacgatgtggacgctatcgtgcctcagagctttctgaaggacgactccatcgacaacaaggtgctgaccagaagcgacaagaaccggggcaagagcgacaacgtgccctccgaagaggtcgtgaagaagatgaagaactactggcggcagctgctgaacgccaagctgattacccagagaaagttcgacaatctgaccaaggccgagagaggcggcctgagcgaactggataaggccggcttcatcaagagacagctggtggaaacccggcagatcacaaagcacgtggcacagatcctggactcccggatgaacactaagtacgacgagaatgacaagctgatccgggaagtgaaagtgatcaccctgaagtccaagctggtgtccgatttccggaaggatttccagttttacaaagtgcgcgagatcaacaactaccaccacgcccacgacgcctacctgaacgccgtcgtgggaaccgccctgatcaaaaagtaccctaagctggaaagcgagttcgtgtacggcgactacaaggtgtacgacgtgcggaagatgatcgccaagagcgagcaggaaatcggcaaggctaccgccaagtacttcttctacagcaacatcatgaactttttcaagaccgagattaccctggccaacggcgagatccggaagcggcctctgatcgagacaaacggcgaaaccggggagatcgtgtgggataagggccgggattttgccaccgtgcggaaagtgctgagcatgccccaagtgaatatcgtgaaaaagaccgaggtgcagacaggcggcttcagcaaagagtctatcctgcccaagaggaacagcgataagctgatcgccagaaagaaggactgggaccctaagaagtacggcggcttcgacagccccaccgtggcctattctgtgctggtggtggccaaagtggaaaagggcaagtccaagaaactgaagagtgtgaaagagctgctggggatcaccatcatggaaagaagcagcttcgagaagaatcccatcgactttctggaagccaagggctacaaagaagtgaaaaaggacctgatcatcaagctgcctaagtactccctgttcgagctggaaaacggccggaagagaatgctggcctctgccggcgaactgcagaagggaaacgaactggccctgccctccaaatatgtgaacttcctgtacctggccagccactatgagaagctgaagggctcccccgaggataatgagcagaaacagctgtttgtggaacagcacaagcactacctggacgagatcatcgagcagatcagcgagttctccaagagagtgatcctggccgacgctaatctggacaaagtgctgtccgcctacaacaagcaccgggataagcccatcagagagcaggccgagaatatcatccacctgtttaccctgaccaatctgggagcccctgccgccttcaagtactttgacaccaccatcgaccggaagaggtacaccagcaccaaagaggtgctggacgccaccctgatccaccagagcatcaccggcctgtacgagacacggatcgacctgtctcagctgggaggtgactccggcggcagcgaggccgccgccaaggaagccgctgccaagagcggcggatctaccctgaacatcgaggacgagtacaggctgcacgagaccagcaaggagcccgacgtgagcctgggcagcacctggctgagcgatttccctcaggcttgggccgagaccggcggcatgggcctggccgtgcggcaggcccccctgattatccccctgaaggccaccagcacccccgtgagcatcaagcagtacccaatgtcccaggaggccaggctgggcatcaagcctcacatccagaggctgctggaccagggcatcctggtgccatgccagtccccctggaacacccctctgctgcccgtgaagaagcctggcaccaacgactaccggcccgtgcaggacctgagagaagtgaacaagcgggtggaggacatccacccaaccgtgcccaacccttacaacctgctgtccggcctgccccccagccaccagtggtacaccgtgctggacctgaaggacgccttcttctgcctgagactgcaccccacctctcagcccctgttcgccttcgagtggcgcgaccccgagatgggcatcagcggccagctgacctggaccagactgccacagggctttaagaatagcccaaccctgtttaacgaggccctgcacagggacctggccgacttcaggatccagcaccccgacctgattctgctgcagtacgtggacgacctgctgctggccgctaccagcgagctggactgccagcagggcaccagagccctgctgcagaccctgggcaacctgggctacagagccagcgccaagaaggcccagatctgtcagaagcaggtgaagtatctgggctacctgctgaaggaaggccagagatggctgaccgaggccagaaaggagactgtgatgggccagcccacccccaagacccccaggcagctgcgggagttcctgggcaaggccggcttttgcagactgtttatccctggcttcgccgagatggccgccccactgtaccctctgaccaagcctggcaccctgtttaactggggccccgaccagcagaaggcctaccaggagatcaagcaggccctgctgaccgcccccgccctgggcctgcccgacctgaccaagcctttcgagctgttcgtggacgagaagcagggatacgccaaaggcgtgctgacccagaagctgggcccctggcggaggcccgtggcctacctgagcaaaaaactggaccctgtggccgccggctggcccccatgcctgcggatggtggccgccatcgctgtgctgaccaaggacgccggcaagctgaccatgggccagcccctggtgatcctggcccctcacgccgtggaggctctggtgaagcagcctccagacaggtggctgtccaacgccaggatgacccactaccaggccctgctgctggacaccgaccgggtgcagttcggccctgtggtggccctgaaccccgccaccctgctgcctctgccagaggagggcctgcagcacaactgcctggacatcctggccgaggcccacggc

SEQ ID NO: 130 - RNA, 5667 nt, synthetic construct
  misc_feature 1..5667: note = Description of Artificial Sequence: Synthetic polynucleotide
  source 1..5667: mol_type = other RNA
gacaagaagtacagcatcggcctggacatcggcaccaactctgtgggctgggccgtgatcaccgacgagtacaaggtgcccagcaagaaattcaaggtgctgggcaacaccgaccggcacagcatcaagaagaacctgatcggagccctgctgttcgacagcggcgaaacagccgaggccacccggctgaagagaaccgccagaagaagatacaccagacggaagaaccggatctgctatctgcaagagatcttcagcaacgagatggccaaggtggacgacagcttcttccacagactggaagagtccttcctggtggaagaggataagaagcacgagcggcaccccatcttcggcaacatcgtggacgaggtggcctaccacgagaagtaccccaccatctaccacctgagaaagaaactggtggacagcaccgacaaggccgacctgcggctgatctatctggccctggcccacatgatcaagttccggggccacttcctgatcgagggcgacctgaaccccgacaacagcgacgtggacaagctgttcatccagctggtgcagacctacaaccagctgttcgaggaaaaccccatcaacgccagcggcgtggacgccaaggccatcctgtctgccagactgagcaagagcagacggctggaaaatctgatcgcccagctgcccggcgagaagaagaatggcctgttcggaaacctgattgccctgagcctgggcctgacccccaacttcaagagcaacttcgacctggccgaggatgccaaactgcagctgagcaaggacacctacgacgacgacctggacaacctgctggcccagatcggcgaccagtacgccgacctgtttctggccgccaagaacctgtccgacgccatcctgctgagcgacatcctgagagtgaacaccgagatcaccaaggcccccctgagcgcctctatgatcaagagatacgacgagcaccaccaggacctgaccctgctgaaagctctcgtgcggcagcagctgcctgagaagtacaaagagattttcttcgaccagagcaagaacggctacgccggctacattgacggcggagccagccaggaagagttctacaagttcatcaagcccatcctggaaaagatggacggcaccgaggaactgctcgtgaagctgaacagagaggacctgctgcggaagcagcggaccttcgacaacggcagcatcccccaccagatccacctgggagagctgcacgccattctgcggcggcaggaagatttttacccattcctgaaggacaaccgggaaaagatcgagaagatcctgaccttccgcatcccctactacgtgggccctctggccaggggaaacagcagattcgcctggatgaccagaaagagcgaggaaaccatcaccccctggaacttcgaggaagtggtggacaagggcgcttccgcccagagcttcatcgagcggatgaccaacttcgataagaacctgcccaacgagaaggtgctgcccaagcacagcctgctgtacgagtacttcaccgtgtataacgagctgaccaaagtgaaatacgtgaccgagggaatgagaaagcccgccttcctgagcggcgagcagaaaaaggccatcgtggacctgctgttcaagaccaaccggaaagtgaccgtgaagcagctgaaagaggactacttcaagaaaatcgagtgcttcgactccgtggaaatctccggcgtggaagatcggttcaacgcctccctgggcacataccacgatctgctgaaaattatcaaggacaaggacttcctggacaatgaggaaaacgaggacattctggaagatatcgtgctgaccctgacactgtttgaggacagagagatgatcgaggaacggctgaaaacctatgcccacctgttcgacgacaaagtgatgaagcagctgaagcggcggagatacaccggctggggcaggctgagccggaagctgatcaacggcatccgggacaagcagtccggcaagacaatcctggatttcctgaagtccgacggcttcgccaacagaaacttcatgcagctgatccacgacgacagcctgacctttaaagaggacatccagaaagcccaggtgtccggccagggcgatagcctgcacgagcacattgccaatctggccggcagccccgccattaagaagggcatcctgcagacagtgaaggtggtggacgagctcgtgaaagtgatgggccggcacaagcccgagaacatcgtgatcgaaatggccagagagaaccagaccacccagaagggacagaagaacagccgcgagagaatgaagcggatcgaagagggcatcaaagagctgggcagccagatcctgaaagaacaccccgtggaaaacacccagctgcagaacgagaagctgtacctgtactacctgcagaatgggcgggatatgtacgtggaccaggaactggacatcaaccggctgtccgactacgatgtggacgctatcgtgcctcagagctttctgaaggacgactccatcgacaacaaggtgctgaccagaagcgacaagaaccggggcaagagcgacaacgtgccctccgaagaggtcgtgaagaagatgaagaactactggcggcagctgctgaacgccaagctgattacccagagaaagttcgacaatctgaccaaggccgagagaggcggcctgagcgaactggataaggccggcttcatcaagagacagctggtggaaacccggcagatcacaaagcacgtggcacagatcctggactcccggatgaacactaagtacgacgagaatgacaagctgatccgggaagtgaaagtgatcaccctgaagtccaagctggtgtccgatttccggaaggatttccagttttacaaagtgcgcgagatcaacaactaccaccacgcccacgacgcctacctgaacgccgtcgtgggaaccgccctgatcaaaaagtaccctaagctggaaagcgagttcgtgtacggcgactacaaggtgtacgacgtgcggaagatgatcgccaagagcgagcaggaaatcggcaaggctaccgccaagtacttcttctacagcaacatcatgaactttttcaagaccgagattaccctggccaacggcgagatccggaagcggcctctgatcgagacaaacggcgaaaccggggagatcgtgtgggataagggccgggattttgccaccgtgcggaaagtgctgagcatgccccaagtgaatatcgtgaaaaagaccgaggtgcagacaggcggcttcagcaaagagtctatcctgcccaagaggaacagcgataagctgatcgccagaaagaaggactgggaccctaagaagtacggcggcttcgacagccccaccgtggcctattctgtgctggtggtggccaaagtggaaaagggcaagtccaagaaactgaagagtgtgaaagagctgctggggatcaccatcatggaaagaagcagcttcgagaagaatcccatcgactttctggaagccaagggctacaaagaagtgaaaaaggacctgatcatcaagctgcctaagtactccctgttcgagctggaaaacggccggaagagaatgctggcctctgccggcgaactgcagaagggaaacgaactggccctgccctccaaatatgtgaacttcctgtacctggccagccactatgagaagctgaagggctcccccgaggataatgagcagaaacagctgtttgtggaacagcacaagcactacctggacgagatcatcgagcagatcagcgagttctccaagagagtgatcctggccgacgctaatctggacaaagtgctgtccgcctacaacaagcaccgggataagcccatcagagagcaggccgagaatatcatccacctgtttaccctgaccaatctgggagcccctgccgccttcaagtactttgacaccaccatcgaccggaagaggtacaccagcaccaaagaggtgctggacgccaccctgatccaccagagcatcaccggcctgtacgagacacggatcgacctgtctcagctgggaggtgactccggcggcagcgaggccgccgccaaggaagccgctgccaagagcggcggatctaccctgaacatcgaggacgagtacaggctgcacgagaccagcaaggagcccgacgtgagcctgggcagcacctggctgagcgatttccctcaggcttgggccgagaccggcggcatgggcctggccgtgcggcaggcccccctgattatccccctgaaggccaccagcacccccgtgagcatcaagcagtacccaatgtcccaggaggccaggctgggcatcaagcctcacatccagaggctgctggaccagggcatcctggtgccatgccagtccccctggaacacccctctgctgcccgtgaagaagcctggcaccaacgactaccggcccgtgcaggacctgagagaagtgaacaagcgggtggaggacatccacccaaccgtgcccaacccttacaacctgctgtccggcctgccccccagccaccagtggtacaccgtgctggacctgaaggacgccttcttctgcctgagactgcaccccacctctcagcccctgttcgccttcgagtggcgcgaccccgagatgggcatcagcggccagctgacctggaccagactgccacagggctttaagaatagcccaaccctgtttaacgaggccctgcacagggacctggccgacttcaggatccagcaccccgacctgattctgctgcagtacgtggacgacctgctgctggccgctaccagcgagctggactgccagcagggcaccagagccctgctgcagaccctgggcaacctgggctacagagccagcgccaagaaggcccagatctgtcagaagcaggtgaagtatctgggctacctgctgaaggaaggccagagatggctgaccgaggccagaaaggagactgtgatgggccagcccacccccaagacccccaggcagctgcgggagttcctgggcaaggccggcttttgcagactgtttatccctggcttcgccgagatggccgccccactgtaccctctgaccaagcctggcaccctgtttaactggggccccgaccagcagaaggcctaccaggagatcaagcaggccctgctgaccgcccccgccctgggcctgcccgacctgaccaagcctttcgagctgttcgtggacgagaagcagggatacgccaaaggcgtgctgacccagaagctgggcccctggcggaggcccgtggcctacctgagcaaaaaactggaccctgtggccgccggctggcccccatgcctgcggatggtggccgccatcgctgtgctgaccaaggacgccggcaagctgaccatgggccagcccctggtgatcctggcccctcacgccgtggaggctctggtgaagcagcctccagacaggtggctgtccaacgccaggatgacccactaccaggccctgctgctggacaccgaccgggtgcagttcggccctgtggtggccctgaaccccgccaccctgctgcctctgccagaggagggcctgcagcacaactgcctggacatcctggccgaggcccacggc

SEQ ID NO: 131 - protein, 2067 aa, synthetic construct
  REGION 1..2067: note = Description of Artificial Sequence: Synthetic polypeptide
DKKYSIGLDIGTNSVGWAVITDEYKVPSKKFKVLGNTDRHSIKKNLIGALLFDSGETAEATRLKRTARRRYTRRKNRICYLQEIFSNEMAKVDDSFFHRLEESFLVEEDKKHERHPIFGNIVDEVAYHEKYPTIYHLRKKLVDSTDKADLRLIYLALAHMIKFRGHFLIEGDLNPDNSDVDKLFIQLVQTYNQLFEENPINASGVDAKAILSARLSKSRRLENLIAQLPGEKKNGLFGNLIALSLGLTPNFKSNFDLAEDAKLQLSKDTYDDDLDNLLAQIGDQYADLFLAAKNLSDAILLSDILRVNTEITKAPLSASMIKRYDEHHQDLTLLKALVRQQLPEKYKEIFFDQSKNGYAGYIDGGASQEEFYKFIKPILEKMDGTEELLVKLNREDLLRKQRTFDNGSIPHQIHLGELHAILRRQEDFYPFLKDNREKIEKILTFRIPYYVGPLARGNSRFAWMTRKSEETITPWNFEEVVDKGASAQSFIERMTNFDKNLPNEKVLPKHSLLYEYFTVYNELTKVKYVTEGMRKPAFLSGEQKKAIVDLLFKTNRKVTVKQLKEDYFKKIECFDSVEISGVEDRFNASLGTYHDLLKIIKDKDFLDNEENEDILEDIVLTLTLFEDREMIEERLKTYAHLFDDKVMKQLKRRRYTGWGRLSRKLINGIRDKQSGKTILDFLKSDGFANRNFMQLIHDDSLTFKEDIQKAQVSGQGDSLHEHIANLAGSPAIKKGILQTVKVVDELVKVMGRHKPENIVIEMARENQTTQKGQKNSRERMKRIEEGIKELGSQILKEHPVENTQLQNEKLYLYYLQNGRDMYVDQELDINRLSDYDVDAIVPQSFLKDDSIDNKVLTRSDKNRGKSDNVPSEEVVKKMKNYWRQLLNAKLITQRKFDNLTKAERGGLSELDKAGFIKRQLVETRQITKHVAQILDSRMNTKYDENDKLIREVKVITLKSKLVSDFRKDFQFYKVREINNYHHAHDAYLNAVVGTALIKKYPKLESEFVYGDYKVYDVRKMIAKSEQEIGKATAKYFFYSNIMNFFKTEITLANGEIRKRPLIETNGETGEIVWDKGRDFATVRKVLSMPQVNIVKKTEVQTGGFSKESILPKRNSDKLIARKKDWDPKKYGGFDSPTVAYSVLVVAKVEKGKSKKLKSVKELLGITIMERSSFEKNPIDFLEAKGYKEVKKDLIIKLPKYSLFELENGRKRMLASAGELQKGNELALPSKYVNFLYLASHYEKLKGSPEDNEQKQLFVEQHKHYLDEIIEQISEFSKRVILADANLDKVLSAYNKHRDKPIREQAENIIHLFTLTNLGAPAAFKYFDTTIDRKRYTSTKEVLDATLIHQSITGLYETRIDLSQLGGDSGGSEAAAKEAAAKEAAAKSGGSTLNIEDEYRLHETSKEPDVSLGSTWLSDFPQAWAETGGMGLAVRQAPLIIPLKATSTPVSIKQYPMSQEARLGIKPHIQRLLDQGILVPCQSPWNTPLLPVKKPGTNDYRPVQDLREVNKRVEDIHPTVPNPYNLLSGLPPSHQWYTVLDLKDAFFCLRLHPTSQPLFAFEWRDPEMGISGQLTWTRLPQGFKNSPTLFNEALHRDLADFRIQHPDLILLQYVDDLLLAATSELDCQQGTRALLQTLGNLGYRASAKKAQICQKQVKYLGYLLKEGQRWLTEARKETVMGQPTPKTPRQLREFLGKAGFCRLFIPGFAEMAAPLYPLTKPGTLFNWGPDQQKAYQEIKQALLTAPALGLPDLTKPFELFVDEKQGYAKGVLTQKLGPWRRPVAYLSKKLDPVAAGWPPCLRMVAAIAVLTKDAGKLTMGQPLVILAPHAVEALVKQPPDRWLSNARMTHYQALLLDTDRVQFGPVVALNPATLLPLPEEGLQHNCLDILAEAHGTRPDLTDQPLPDADHTWYTDGSSLLQEGQRKAGAAVTTETEVIWAKALPAGTSAQRAELIALTQALKMAEGKKLNVYTDSRYAFATAHIHGEIYRRRGWLTSEGKEIKNKDEILALLKALFLPKRLSIIHCPGHQKGHSAEARGNRMADQAARKAAITETPDTSTLLIENSSP

SEQ ID NO: 132 - DNA, 6201 bp, synthetic construct
  misc_feature 1..6201: note = Description of Artificial Sequence: Synthetic polynucleotide
  source 1..6201: mol_type = other DNA
gacaagaagtacagcatcggcctggacatcggcaccaactctgtgggctgggccgtgatcaccgacgagtacaaggtgcccagcaagaaattcaaggtgctgggcaacaccgaccggcacagcatcaagaagaacctgatcggagccctgctgttcgacagcggcgaaacagccgaggccacccggctgaagagaaccgccagaagaagatacaccagacggaagaaccggatctgctatctgcaagagatcttcagcaacgagatggccaaggtggacgacagcttcttccacagactggaagagtccttcctggtggaagaggataagaagcacgagcggcaccccatcttcggcaacatcgtggacgaggtggcctaccacgagaagtaccccaccatctaccacctgagaaagaaactggtggacagcaccgacaaggccgacctgcggctgatctatctggccctggcccacatgatcaagttccggggccacttcctgatcgagggcgacctgaaccccgacaacagcgacgtggacaagctgttcatccagctggtgcagacctacaaccagctgttcgaggaaaaccccatcaacgccagcggcgtggacgccaaggccatcctgtctgccagactgagcaagagcagacggctggaaaatctgatcgcccagctgcccggcgagaagaagaatggcctgttcggaaacctgattgccctgagcctgggcctgacccccaacttcaagagcaacttcgacctggccgaggatgccaaactgcagctgagcaaggacacctacgacgacgacctggacaacctgctggcccagatcggcgaccagtacgccgacctgtttctggccgccaagaacctgtccgacgccatcctgctgagcgacatcctgagagtgaacaccgagatcaccaaggcccccctgagcgcctctatgatcaagagatacgacgagcaccaccaggacctgaccctgctgaaagctctcgtgcggcagcagctgcctgagaagtacaaagagattttcttcgaccagagcaagaacggctacgccggctacattgacggcggagccagccaggaagagttctacaagttcatcaagcccatcctggaaaagatggacggcaccgaggaactgctcgtgaagctgaacagagaggacctgctgcggaagcagcggaccttcgacaacggcagcatcccccaccagatccacctgggagagctgcacgccattctgcggcggcaggaagatttttacccattcctgaaggacaaccgggaaaagatcgagaagatcctgaccttccgcatcccctactacgtgggccctctggccaggggaaacagcagattcgcctggatgaccagaaagagcgaggaaaccatcaccccctggaacttcgaggaagtggtggacaagggcgcttccgcccagagcttcatcgagcggatgaccaacttcgataagaacctgcccaacgagaaggtgctgcccaagcacagcctgctgtacgagtacttcaccgtgtataacgagctgaccaaagtgaaatacgtgaccgagggaatgagaaagcccgccttcctgagcggcgagcagaaaaaggccatcgtggacctgctgttcaagaccaaccggaaagtgaccgtgaagcagctgaaagaggactacttcaagaaaatcgagtgcttcgactccgtggaaatctccggcgtggaagatcggttcaacgcctccctgggcacataccacgatctgctgaaaattatcaaggacaaggacttcctggacaatgaggaaaacgaggacattctggaagatatcgtgctgaccctgacactgtttgaggacagagagatgatcgaggaacggctgaaaacctatgcccacctgttcgacgacaaagtgatgaagcagctgaagcggcggagatacaccggctggggcaggctgagccggaagctgatcaacggcatccgggacaagcagtccggcaagacaatcctggatttcctgaagtccgacggcttcgccaacagaaacttcatgcagctgatccacgacgacagcctgacctttaaagaggacatccagaaagcccaggtgtccggccagggcgatagcctgcacgagcacattgccaatctggccggcagccccgccattaagaagggcatcctgcagacagtgaaggtggtggacgagctcgtgaaagtgatgggccggcacaagcccgagaacatcgtgatcgaaatggccagagagaaccagaccacccagaagggacagaagaacagccgcgagagaatgaagcggatcgaagagggcatcaaagagctgggcagccagatcctgaaagaacaccccgtggaaaacacccagctgcagaacgagaagctgtacctgtactacctgcagaatgggcgggatatgtacgtggaccaggaactggacatcaaccggctgtccgactacgatgtggacgctatcgtgcctcagagctttctgaaggacgactccatcgacaacaaggtgctgaccagaagcgacaagaaccggggcaagagcgacaacgtgccctccgaagaggtcgtgaagaagatgaagaactactggcggcagctgctgaacgccaagctgattacccagagaaagttcgacaatctgaccaaggccgagagaggcggcctgagcgaactggataaggccggcttcatcaagagacagctggtggaaacccggcagatcacaaagcacgtggcacagatcctggactcccggatgaacactaagtacgacgagaatgacaagctgatccgggaagtgaaagtgatcaccctgaagtccaagctggtgtccgatttccggaaggatttccagttttacaaagtgcgcgagatcaacaactaccaccacgcccacgacgcctacctgaacgccgtcgtgggaaccgccctgatcaaaaagtaccctaagctggaaagcgagttcgtgtacggcgactacaaggtgtacgacgtgcggaagatgatcgccaagagcgagcaggaaatcggcaaggctaccgccaagtacttcttctacagcaacatcatgaactttttcaagaccgagattaccctggccaacggcgagatccggaagcggcctctgatcgagacaaacggcgaaaccggggagatcgtgtgggataagggccgggattttgccaccgtgcggaaagtgctgagcatgccccaagtgaatatcgtgaaaaagaccgaggtgcagacaggcggcttcagcaaagagtctatcctgcccaagaggaacagcgataagctgatcgccagaaagaaggactgggaccctaagaagtacggcggcttcgacagccccaccgtggcctattctgtgctggtggtggccaaagtggaaaagggcaagtccaagaaactgaagagtgtgaaagagctgctggggatcaccatcatggaaagaagcagcttcgagaagaatcccatcgactttctggaagccaagggctacaaagaagtgaaaaaggacctgatcatcaagctgcctaagtactccctgttcgagctggaaaacggccggaagagaatgctggcctctgccggcgaactgcagaagggaaacgaactggccctgccctccaaatatgtgaacttcctgtacctggccagccactatgagaagctgaagggctcccccgaggataatgagcagaaacagctgtttgtggaacagcacaagcactacctggacgagatcatcgagcagatcagcgagttctccaagagagtgatcctggccgacgctaatctggacaaagtgctgtccgcctacaacaagcaccgggataagcccatcagagagcaggccgagaatatcatccacctgtttaccctgaccaatctgggagcccctgccgccttcaagtactttgacaccaccatcgaccggaagaggtacaccagcaccaaagaggtgctggacgccaccctgatccaccagagcatcaccggcctgtacgagacacggatcgacctgtctcagctgggaggtgactccggcggcagcgaggccgccgctaaagaggccgccgccaaggaagccgctgccaagagcggcggatctaccctgaacatcgaggacgagtacaggctgcacgagaccagcaaggagcccgacgtgagcctgggcagcacctggctgagcgatttccctcaggcttgggccgagaccggcggcatgggcctggccgtgcggcaggcccccctgattatccccctgaaggccaccagcacccccgtgagcatcaagcagtacccaatgtcccaggaggccaggctgggcatcaagcctcacatccagaggctgctggaccagggcatcctggtgccatgccagtccccctggaacacccctctgctgcccgtgaagaagcctggcaccaacgactaccggcccgtgcaggacctgagagaagtgaacaagcgggtggaggacatccacccaaccgtgcccaacccttacaacctgctgtccggcctgccccccagccaccagtggtacaccgtgctggacctgaaggacgccttcttctgcctgagactgcaccccacctctcagcccctgttcgccttcgagtggcgcgaccccgagatgggcatcagcggccagctgacctggaccagactgccacagggctttaagaatagcccaaccctgtttaacgaggccctgcacagggacctggccgacttcaggatccagcaccccgacctgattctgctgcagtacgtggacgacctgctgctggccgctaccagcgagctggactgccagcagggcaccagagccctgctgcagaccctgggcaacctgggctacagagccagcgccaagaaggcccagatctgtcagaagcaggtgaagtatctgggctacctgctgaaggaaggccagagatggctgaccgaggccagaaaggagactgtgatgggccagcccacccccaagacccccaggcagctgcgggagttcctgggcaaggccggcttttgcagactgtttatccctggcttcgccgagatggccgccccactgtaccctctgaccaagcctggcaccctgtttaactggggccccgaccagcagaaggcctaccaggagatcaagcaggccctgctgaccgcccccgccctgggcctgcccgacctgaccaagcctttcgagctgttcgtggacgagaagcagggatacgccaaaggcgtgctgacccagaagctgggcccctggcggaggcccgtggcctacctgagcaaaaaactggaccctgtggccgccggctggcccccatgcctgcggatggtggccgccatcgctgtgctgaccaaggacgccggcaagctgaccatgggccagcccctggtgatcctggcccctcacgccgtggaggctctggtgaagcagcctccagacaggtggctgtccaacgccaggatgacccactaccaggccctgctgctggacaccgaccgggtgcagttcggccctgtggtggccctgaaccccgccaccctgctgcctctgccagaggagggcctgcagcacaactgcctggacatcctggccgaggcccacggcaccaggcccgacctgaccgaccagcccctgcctgacgccgaccacacctggtacaccgacggcagctccctgctgcaggagggccagaggaaggccggcgccgccgtgaccaccgagaccgaggtgatctgggccaaagccctgcctgccggcacctccgcccagcgggccgagctgatcgccctgacccaggccctgaagatggctgagggcaagaagctgaacgtgtacaccgattccagatacgccttcgccaccgcccacatccacggcgagatctacagaagaaggggctggctgacctccgagggcaaggagatcaagaacaaggacgagattctggccctgctgaaggccctgttcctgcctaagagactgagcatcatccactgtcccggccaccagaagggccacagcgccgaggccagaggcaatagaatggccgaccaggccgccagaaaggccgccatcaccgagacccccgacaccagcaccctgctgatcgagaacagcagcccc

SEQ ID NO: 133 - RNA, 6201 nt, synthetic construct
  misc_feature 1..6201: note = Description of Artificial Sequence: Synthetic polynucleotide
  source 1..6201: mol_type = other RNA
gacaagaagtacagcatcggcctggacatcggcaccaactctgtgggctgggccgtgatcaccgacgagtacaaggtgcccagcaagaaattcaaggtgctgggcaacaccgaccggcacagcatcaagaagaacctgatcggagccctgctgttcgacagcggcgaaacagccgaggccacccggctgaagagaaccgccagaagaagatacaccagacggaagaaccggatctgctatctgcaagagatcttcagcaacgagatggccaaggtggacgacagcttcttccacagactggaagagtccttcctggtggaagaggataagaagcacgagcggcaccccatcttcggcaacatcgtggacgaggtggcctaccacgagaagtaccccaccatctaccacctgagaaagaaactggtggacagcaccgacaaggccgacctgcggctgatctatctggccctggcccacatgatcaagttccggggccacttcctgatcgagggcgacctgaaccccgacaacagcgacgtggacaagctgttcatccagctggtgcagacctacaaccagctgttcgaggaaaaccccatcaacgccagcggcgtggacgccaaggccatcctgtctgccagactgagcaagagcagacggctggaaaatctgatcgcccagctgcccggcgagaagaagaatggcctgttcggaaacctgattgccctgagcctgggcctgacccccaacttcaagagcaacttcgacctggccgaggatgccaaactgcagctgagcaaggacacctacgacgacgacctggacaacctgctggcccagatcggcgaccagtacgccgacctgtttctggccgccaagaacctgtccgacgccatcctgctgagcgacatcctgagagtgaacaccgagatcaccaaggcccccctgagcgcctctatgatcaagagatacgacgagcaccaccaggacctgaccctgctgaaagctctcgtgcggcagcagctgcctgagaagtacaaagagattttcttcgaccagagcaagaacggctacgccggctacattgacggcggagccagccaggaagagttctacaagttcatcaagcccatcctggaaaagatggacggcaccgaggaactgctcgtgaagctgaacagagaggacctgctgcggaagcagcggaccttcgacaacggcagcatcccccaccagatccacctgggagagctgcacgccattctgcggcggcaggaagatttttacccattcctgaaggacaaccgggaaaagatcgagaagatcctgaccttccgcatcccctactacgtgggccctctggccaggggaaacagcagattcgcctggatgaccagaaagagcgaggaaaccatcaccccctggaacttcgaggaagtggtggacaagggcgcttccgcccagagcttcatcgagcggatgaccaacttcgataagaacctgcccaacgagaaggtgctgcccaagcacagcctgctgtacgagtacttcaccgtgtataacgagctgaccaaagtgaaatacgtgaccgagggaatgagaaagcccgccttcctgagcggcgagcagaaaaaggccatcgtggacctgctgttcaagaccaaccggaaagtgaccgtgaagcagctgaaagaggactacttcaagaaaatcgagtgcttcgactccgtggaaatctccggcgtggaagatcggttcaacgcctccctgggcacataccacgatctgctgaaaattatcaaggacaaggacttcctggacaatgaggaaaacgaggacattctggaagatatcgtgctgaccctgacactgtttgaggacagagagatgatcgaggaacggctgaaaacctatgcccacctgttcgacgacaaagtgatgaagcagctgaagcggcggagatacaccggctggggcaggctgagccggaagctgatcaacggcatccgggacaagcagtccggcaagacaatcctggatttcctgaagtccgacggcttcgccaacagaaacttcatgcagctgatccacgacgacagcctgacctttaaagaggacatccagaaagcccaggtgtccggccagggcgatagcctgcacgagcacattgccaatctggccggcagccccgccattaagaagggcatcctgcagacagtgaaggtggtggacgagctcgtgaaagtgatgggccggcacaagcccgagaacatcgtgatcgaaatggccagagagaaccagaccacccagaagggacagaagaacagccgcgagagaatgaagcggatcgaagagggcatcaaagagctgggcagccagatcctgaaagaacaccccgtggaaaacacccagctgcagaacgagaagctgtacctgtactacctgcagaatgggcgggatatgtacgtggaccaggaactggacatcaaccggctgtccgactacgatgtggacgctatcgtgcctcagagctttctgaaggacgactccatcgacaacaaggtgctgaccagaagcgacaagaaccggggcaagagcgacaacgtgccctccgaagaggtcgtgaagaagatgaagaactactggcggcagctgctgaacgccaagctgattacccagagaaagttcgacaatctgaccaaggccgagagaggcggcctgagcgaactggataaggccggcttcatcaagagacagctggtggaaacccggcagatcacaaagcacgtggcacagatcctggactcccggatgaacactaagtacgacgagaatgacaagctgatccgggaagtgaaagtgatcaccctgaagtccaagctggtgtccgatttccggaaggatttccagttttacaaagtgcgcgagatcaacaactaccaccacgcccacgacgcctacctgaacgccgtcgtgggaaccgccctgatcaaaaagtaccctaagctggaaagcgagttcgtgtacggcgactacaaggtgtacgacgtgcggaagatgatcgccaagagcgagcaggaaatcggcaaggctaccgccaagtacttcttctacagcaacatcatgaactttttcaagaccgagattaccctggccaacggcgagatccggaagcggcctctgatcgagacaaacggcgaaaccggggagatcgtgtgggataagggccgggattttgccaccgtgcggaaagtgctgagcatgccccaagtgaatatcgtgaaaaagaccgaggtgcagacaggcggcttcagcaaagagtctatcctgcccaagaggaacagcgataagctgatcgccagaaagaaggactgggaccctaagaagtacggcggcttcgacagccccaccgtggcctattctgtgctggtggtggccaaagtggaaaagggcaagtccaagaaactgaagagtgtgaaagagctgctggggatcaccatcatggaaagaagcagcttcgagaagaatcccatcgactttctggaagccaagggctacaaagaagtgaaaaaggacctgatcatcaagctgcctaagtactccctgttcgagctggaaaacggccggaagagaatgctggcctctgccggcgaactgcagaagggaaacgaactggccctgccctccaaatatgtgaacttcctgtacctggccagccactatgagaagctgaagggctcccccgaggataatgagcagaaacagctgtttgtggaacagcacaagcactacctggacgagatcatcgagcagatcagcgagttctccaagagagtgatcctggccgacgctaatctggacaaagtgctgtccgcctacaacaagcaccgggataagcccatcagagagcaggccgagaatatcatccacctgtttaccctgaccaatctgggagcccctgccgccttcaagtactttgacaccaccatcgaccggaagaggtacaccagcaccaaagaggtgctggacgccaccctgatccaccagagcatcaccggcctgtacgagacacggatcgacctgtctcagctgggaggtgactccggcggcagcgaggccgccgctaaagaggccgccgccaaggaagccgctgccaagagcggcggatctaccctgaacatcgaggacgagtacaggctgcacgagaccagcaaggagcccgacgtgagcctgggcagcacctggctgagcgatttccctcaggcttgggccgagaccggcggcatgggcctggccgtgcggcaggcccccctgattatccccctgaaggccaccagcacccccgtgagcatcaagcagtacccaatgtcccaggaggccaggctgggcatcaagcctcacatccagaggctgctggaccagggcatcctggtgccatgccagtccccctggaacacccctctgctgcccgtgaagaagcctggcaccaacgactaccggcccgtgcaggacctgagagaagtgaacaagcgggtggaggacatccacccaaccgtgcccaacccttacaacctgctgtccggcctgccccccagccaccagtggtacaccgtgctggacctgaaggacgccttcttctgcctgagactgcaccccacctctcagcccctgttcgccttcgagtggcgcgaccccgagatgggcatcagcggccagctgacctggaccagactgccacagggctttaagaatagcccaaccctgtttaacgaggccctgcacagggacctggccgacttcaggatccagcaccccgacctgattctgctgcagtacgtggacgacctgctgctggccgctaccagcgagctggactgccagcagggcaccagagccctgctgcagaccctgggcaacctgggctacagagccagcgccaagaaggcccagatctgtcagaagcaggtgaagtatctgggctacctgctgaaggaaggccagagatggctgaccgaggccagaaaggagactgtgatgggccagcccacccccaagacccccaggcagctgcgggagttcctgggcaaggccggcttttgcagactgtttatccctggcttcgccgagatggccgccccactgtaccctctgaccaagcctggcaccctgtttaactggggccccgaccagcagaaggcctaccaggagatcaagcaggccctgctgaccgcccccgccctgggcctgcccgacctgaccaagcctttcgagctgttcgtggacgagaagcagggatacgccaaaggcgtgctgacccagaagctgggcccctggcggaggcccgtggcctacctgagcaaaaaactggaccctgtggccgccggctggcccccatgcctgcggatggtggccgccatcgctgtgctgaccaaggacgccggcaagctgaccatgggccagcccctggtgatcctggcccctcacgccgtggaggctctggtgaagcagcctccagacaggtggctgtccaacgccaggatgacccactaccaggccctgctgctggacaccgaccgggtgcagttcggccctgtggtggccctgaaccccgccaccctgctgcctctgccagaggagggcctgcagcacaactgcctggacatcctggccgaggcccacggcaccaggcccgacctgaccgaccagcccctgcctgacgccgaccacacctggtacaccgacggcagctccctgctgcaggagggccagaggaaggccggcgccgccgtgaccaccgagaccgaggtgatctgggccaaagccctgcctgccggcacctccgcccagcgggccgagctgatcgccctgacccaggccctgaagatggctgagggcaagaagctgaacgtgtacaccgattccagatacgccttcgccaccgcccacatccacggcgagatctacagaagaaggggctggctgacctccgagggcaaggagatcaagaacaaggacgagattctggccctgctgaaggccctgttcctgcctaagagactgagcatcatccactgtcccggccaccagaagggccacagcgccgaggccagaggcaatagaatggccgaccaggccgccagaaaggccgccatcaccgagacccccgacaccagcaccctgctgatcgagaacagcagcccc

SEQ ID NO: 134 - protein, 1894 aa, synthetic construct
  REGION 1..1894: note = Description of Artificial Sequence: Synthetic polypeptide
DKKYSIGLDIGTNSVGWAVITDEYKVPSKKFKVLGNTDRHSIKKNLIGALLFDSGETAEATRLKRTARRRYTRRKNRICYLQEIFSNEMAKVDDSFFHRLEESFLVEEDKKHERHPIFGNIVDEVAYHEKYPTIYHLRKKLVDSTDKADLRLIYLALAHMIKFRGHFLIEGDLNPDNSDVDKLFIQLVQTYNQLFEENPINASGVDAKAILSARLSKSRRLENLIAQLPGEKKNGLFGNLIALSLGLTPNFKSNFDLAEDAKLQLSKDTYDDDLDNLLAQIGDQYADLFLAAKNLSDAILLSDILRVNTEITKAPLSASMIKRYDEHHQDLTLLKALVRQQLPEKYKEIFFDQSKNGYAGYIDGGASQEEFYKFIKPILEKMDGTEELLVKLNREDLLRKQRTFDNGSIPHQIHLGELHAILRRQEDFYPFLKDNREKIEKILTFRIPYYVGPLARGNSRFAWMTRKSEETITPWNFEEVVDKGASAQSFIERMTNFDKNLPNEKVLPKHSLLYEYFTVYNELTKVKYVTEGMRKPAFLSGEQKKAIVDLLFKTNRKVTVKQLKEDYFKKIECFDSVEISGVEDRFNASLGTYHDLLKIIKDKDFLDNEENEDILEDIVLTLTLFEDREMIEERLKTYAHLFDDKVMKQLKRRRYTGWGRLSRKLINGIRDKQSGKTILDFLKSDGFANRNFMQLIHDDSLTFKEDIQKAQVSGQGDSLHEHIANLAGSPAIKKGILQTVKVVDELVKVMGRHKPENIVIEMARENQTTQKGQKNSRERMKRIEEGIKELGSQILKEHPVENTQLQNEKLYLYYLQNGRDMYVDQELDINRLSDYDVDAIVPQSFLKDDSIDNKVLTRSDKNRGKSDNVPSEEVVKKMKNYWRQLLNAKLITQRKFDNLTKAERGGLSELDKAGFIKRQLVETRQITKHVAQILDSRMNTKYDENDKLIREVKVITLKSKLVSDFRKDFQFYKVREINNYHHAHDAYLNAVVGTALIKKYPKLESEFVYGDYKVYDVRKMIAKSEQEIGKATAKYFFYSNIMNFFKTEITLANGEIRKRPLIETNGETGEIVWDKGRDFATVRKVLSMPQVNIVKKTEVQTGGFSKESILPKRNSDKLIARKKDWDPKKYGGFDSPTVAYSVLVVAKVEKGKSKKLKSVKELLGITIMERSSFEKNPIDFLEAKGYKEVKKDLIIKLPKYSLFELENGRKRMLASAGELQKGNELALPSKYVNFLYLASHYEKLKGSPEDNEQKQLFVEQHKHYLDEIIEQISEFSKRVILADANLDKVLSAYNKHRDKPIREQAENIIHLFTLTNLGAPAAFKYFDTTIDRKRYTSTKEVLDATLIHQSITGLYETRIDLSQLGGDSGGSEAAAKEAAAKEAAAKSGGSTLNIEDEYRLHETSKEPDVSLGSTWLSDFPQAWAETGGMGLAVRQAPLIIPLKATSTPVSIKQYPMSQEARLGIKPHIQRLLDQGILVPCQSPWNTPLLPVKKPGTNDYRPVQDLREVNKRVEDIHPTVPNPYNLLSGLPPSHQWYTVLDLKDAFFCLRLHPTSQPLFAFEWRDPEMGISGQLTWTRLPQGFKNSPTLFNEALHRDLADFRIQHPDLILLQYVDDLLLAATSELDCQQGTRALLQTLGNLGYRASAKKAQICQKQVKYLGYLLKEGQRWLTEARKETVMGQPTPKTPRQLREFLGKAGFCRLFIPGFAEMAAPLYPLTKPGTLFNWGPDQQKAYQEIKQALLTAPALGLPDLTKPFELFVDEKQGYAKGVLTQKLGPWRRPVAYLSKKLDPVAAGWPPCLRMVAAIAVLTKDAGKLTMGQPLVILAPHAVEALVKQPPDRWLSNARMTHYQALLLDTDRVQFGPVVALNPATLLPLPEEGLQHNCLDILAEAHG

SEQ ID NO: 135 - DNA, 5682 bp, synthetic construct
  misc_feature 1..5682: note = Description of Artificial Sequence: Synthetic polynucleotide
  source 1..5682: mol_type = other DNA
gacaagaagtacagcatcggcctggacatcggcaccaactctgtgggctgggccgtgatcaccgacgagtacaaggtgcccagcaagaaattcaaggtgctgggcaacaccgaccggcacagcatcaagaagaacctgatcggagccctgctgttcgacagcggcgaaacagccgaggccacccggctgaagagaaccgccagaagaagatacaccagacggaagaaccggatctgctatctgcaagagatcttcagcaacgagatggccaaggtggacgacagcttcttccacagactggaagagtccttcctggtggaagaggataagaagcacgagcggcaccccatcttcggcaacatcgtggacgaggtggcctaccacgagaagtaccccaccatctaccacctgagaaagaaactggtggacagcaccgacaaggccgacctgcggctgatctatctggccctggcccacatgatcaagttccggggccacttcctgatcgagggcgacctgaaccccgacaacagcgacgtggacaagctgttcatccagctggtgcagacctacaaccagctgttcgaggaaaaccccatcaacgccagcggcgtggacgccaaggccatcctgtctgccagactgagcaagagcagacggctggaaaatctgatcgcccagctgcccggcgagaagaagaatggcctgttcggaaacctgattgccctgagcctgggcctgacccccaacttcaagagcaacttcgacctggccgaggatgccaaactgcagctgagcaaggacacctacgacgacgacctggacaacctgctggcccagatcggcgaccagtacgccgacctgtttctggccgccaagaacctgtccgacgccatcctgctgagcgacatcctgagagtgaacaccgagatcaccaaggcccccctgagcgcctctatgatcaagagatacgacgagcaccaccaggacctgaccctgctgaaagctctcgtgcggcagcagctgcctgagaagtacaaagagattttcttcgaccagagcaagaacggctacgccggctacattgacggcggagccagccaggaagagttctacaagttcatcaagcccatcctggaaaagatggacggcaccgaggaactgctcgtgaagctgaacagagaggacctgctgcggaagcagcggaccttcgacaacggcagcatcccccaccagatccacctgggagagctgcacgccattctgcggcggcaggaagatttttacccattcctgaaggacaaccgggaaaagatcgagaagatcctgaccttccgcatcccctactacgtgggccctctggccaggggaaacagcagattcgcctggatgaccagaaagagcgaggaaaccatcaccccctggaacttcgaggaagtggtggacaagggcgcttccgcccagagcttcatcgagcggatgaccaacttcgataagaacctgcccaacgagaaggtgctgcccaagcacagcctgctgtacgagtacttcaccgtgtataacgagctgaccaaagtgaaatacgtgaccgagggaatgagaaagcccgccttcctgagcggcgagcagaaaaaggccatcgtggacctgctgttcaagaccaaccggaaagtgaccgtgaagcagctgaaagaggactacttcaagaaaatcgagtgcttcgactccgtggaaatctccggcgtggaagatcggttcaacgcctccctgggcacataccacgatctgctgaaaattatcaaggacaaggacttcctggacaatgaggaaaacgaggacattctggaagatatcgtgctgaccctgacactgtttgaggacagagagatgatcgaggaacggctgaaaacctatgcccacctgttcgacgacaaagtgatgaagcagctgaagcggcggagatacaccggctggggcaggctgagccggaagctgatcaacggcatccgggacaagcagtccggcaagacaatcctggatttcctgaagtccgacggcttcgccaacagaaacttcatgcagctgatccacgacgacagcctgacctttaaagaggacatccagaaagcccaggtgtccggccagggcgatagcctgcacgagcacattgccaatctggccggcagccccgccattaagaagggcatcctgcagacagtgaaggtggtggacgagctcgtgaaagtgatgggccggcacaagcccgagaacatcgtgatcgaaatggccagagagaaccagaccacccagaagggacagaagaacagccgcgagagaatgaagcggatcgaagagggcatcaaagagctgggcagccagatcctgaaagaacaccccgtggaaaacacccagctgcagaacgagaagctgtacctgtactacctgcagaatgggcgggatatgtacgtggaccaggaactggacatcaaccggctgtccgactacgatgtggacgctatcgtgcctcagagctttctgaaggacgactccatcgacaacaaggtgctgaccagaagcgacaagaaccggggcaagagcgacaacgtgccctccgaagaggtcgtgaagaagatgaagaactactggcggcagctgctgaacgccaagctgattacccagagaaagttcgacaatctgaccaaggccgagagaggcggcctgagcgaactggataaggccggcttcatcaagagacagctggtggaaacccggcagatcacaaagcacgtggcacagatcctggactcccggatgaacactaagtacgacgagaatgacaagctgatccgggaagtgaaagtgatcaccctgaagtccaagctggtgtccgatttccggaaggatttccagttttacaaagtgcgcgagatcaacaactaccaccacgcccacgacgcctacctgaacgccgtcgtgggaaccgccctgatcaaaaagtaccctaagctggaaagcgagttcgtgtacggcgactacaaggtgtacgacgtgcggaagatgatcgccaagagcgagcaggaaatcggcaaggctaccgccaagtacttcttctacagcaacatcatgaactttttcaagaccgagattaccctggccaacggcgagatccggaagcggcctctgatcgagacaaacggcgaaaccggggagatcgtgtgggataagggccgggattttgccaccgtgcggaaagtgctgagcatgccccaagtgaatatcgtgaaaaagaccgaggtgcagacaggcggcttcagcaaagagtctatcctgcccaagaggaacagcgataagctgatcgccagaaagaaggactgggaccctaagaagtacggcggcttcgacagccccaccgtggcctattctgtgctggtggtggccaaagtggaaaagggcaagtccaagaaactgaagagtgtgaaagagctgctggggatcaccatcatggaaagaagcagcttcgagaagaatcccatcgactttctggaagccaagggctacaaagaagtgaaaaaggacctgatcatcaagctgcctaagtactccctgttcgagctggaaaacggccggaagagaatgctggcctctgccggcgaactgcagaagggaaacgaactggccctgccctccaaatatgtgaacttcctgtacctggccagccactatgagaagctgaagggctcccccgaggataatgagcagaaacagctgtttgtggaacagcacaagcactacctggacgagatcatcgagcagatcagcgagttctccaagagagtgatcctggccgacgctaatctggacaaagtgctgtccgcctacaacaagcaccgggataagcccatcagagagcaggccgagaatatcatccacctgtttaccctgaccaatctgggagcccctgccgccttcaagtactttgacaccaccatcgaccggaagaggtacaccagcaccaaagaggtgctggacgccaccctgatccaccagagcatcaccggcctgtacgagacacggatcgacctgtctcagctgggaggtgactccggcggcagcgaggccgccgctaaagaggccgccgccaaggaagccgctgccaagagcggcggatctaccctgaacatcgaggacgagtacaggctgcacgagaccagcaaggagcccgacgtgagcctgggcagcacctggctgagcgatttccctcaggcttgggccgagaccggcggcatgggcctggccgtgcggcaggcccccctgattatccccctgaaggccaccagcacccccgtgagcatcaagcagtacccaatgtcccaggaggccaggctgggcatcaagcctcacatccagaggctgctggaccagggcatcctggtgccatgccagtccccctggaacacccctctgctgcccgtgaagaagcctggcaccaacgactaccggcccgtgcaggacctgagagaagtgaacaagcgggtggaggacatccacccaaccgtgcccaacccttacaacctgctgtccggcctgccccccagccaccagtggtacaccgtgctggacctgaaggacgccttcttctgcctgagactgcaccccacctctcagcccctgttcgccttcgagtggcgcgaccccgagatgggcatcagcggccagctgacctggaccagactgccacagggctttaagaatagcccaaccctgtttaacgaggccctgcacagggacctggccgacttcaggatccagcaccccgacctgattctgctgcagtacgtggacgacctgctgctggccgctaccagcgagctggactgccagcagggcaccagagccctgctgcagaccctgggcaacctgggctacagagccagcgccaagaaggcccagatctgtcagaagcaggtgaagtatctgggctacctgctgaaggaaggccagagatggctgaccgaggccagaaaggagactgtgatgggccagcccacccccaagacccccaggcagctgcgggagttcctgggcaaggccggcttttgcagactgtttatccctggcttcgccgagatggccgccccactgtaccctctgaccaagcctggcaccctgtttaactggggccccgaccagcagaaggcctaccaggagatcaagcaggccctgctgaccgcccccgccctgggcctgcccgacctgaccaagcctttcgagctgttcgtggacgagaagcagggatacgccaaaggcgtgctgacccagaagctgggcccctggcggaggcccgtggcctacctgagcaaaaaactggaccctgtggccgccggctggcccccatgcctgcggatggtggccgccatcgctgtgctgaccaaggacgccggcaagctgaccatgggccagcccctggtgatcctggcccctcacgccgtggaggctctggtgaagcagcctccagacaggtggctgtccaacgccaggatgacccactaccaggccctgctgctggacaccgaccgggtgcagttcggccctgtggtggccctgaaccccgccaccctgctgcctctgccagaggagggcctgcagcacaactgcctggacatcctggccgaggcccacggc

SEQ ID NO: 136 - RNA, 5682 nt, synthetic construct
  misc_feature 1..5682: note = Description of Artificial Sequence: Synthetic polynucleotide
  source 1..5682: mol_type = other RNA
gacaagaagtacagcatcggcctggacatcggcaccaactctgtgggctgggccgtgatcaccgacgagtacaaggtgcccagcaagaaattcaaggtgctgggcaacaccgaccggcacagcatcaagaagaacctgatcggagccctgctgttcgacagcggcgaaacagccgaggccacccggctgaagagaaccgccagaagaagatacaccagacggaagaaccggatctgctatctgcaagagatcttcagcaacgagatggccaaggtggacgacagcttcttccacagactggaagagtccttcctggtggaagaggataagaagcacgagcggcaccccatcttcggcaacatcgtggacgaggtggcctaccacgagaagtaccccaccatctaccacctgagaaagaaactggtggacagcaccgacaaggccgacctgcggctgatctatctggccctggcccacatgatcaagttccggggccacttcctgatcgagggcgacctgaaccccgacaacagcgacgtggacaagctgttcatccagctggtgcagacctacaaccagctgttcgaggaaaaccccatcaacgccagcggcgtggacgccaaggccatcctgtctgccagactgagcaagagcagacggctggaaaatctgatcgcccagctgcccggcgagaagaagaatggcctgttcggaaacctgattgccctgagcctgggcctgacccccaacttcaagagcaacttcgacctggccgaggatgccaaactgcagctgagcaaggacacctacgacgacgacctggacaacctgctggcccagatcggcgaccagtacgccgacctgtttctggccgccaagaacctgtccgacgccatcctgctgagcgacatcctgagagtgaacaccgagatcaccaaggcccccctgagcgcctctatgatcaagagatacgacgagcaccaccaggacctgaccctgctgaaagctctcgtgcggcagcagctgcctgagaagtacaaagagattttcttcgaccagagcaagaacggctacgccggctacattgacggcggagccagccaggaagagttctacaagttcatcaagcccatcctggaaaagatggacggcaccgaggaactgctcgtgaagctgaacagagaggacctgctgcggaagcagcggaccttcgacaacggcagcatcccccaccagatccacctgggagagctgcacgccattctgcggcggcaggaagatttttacccattcctgaaggacaaccgggaaaagatcgagaagatcctgaccttccgcatcccctactacgtgggccctctggccaggggaaacagcagattcgcctggatgaccagaaagagcgaggaaaccatcaccccctggaacttcgaggaagtggtggacaagggcgcttccgcccagagcttcatcgagcggatgaccaacttcgataagaacctgcccaacgagaaggtgctgcccaagcacagcctgctgtacgagtacttcaccgtgtataacgagctgaccaaagtgaaatacgtgaccgagggaatgagaaagcccgccttcctgagcggcgagcagaaaaaggccatcgtggacctgctgttcaagaccaaccggaaagtgaccgtgaagcagctgaaagaggactacttcaagaaaatcgagtgcttcgactccgtggaaatctccggcgtggaagatcggttcaacgcctccctgggcacataccacgatctgctgaaaattatcaaggacaaggacttcctggacaatgaggaaaacgaggacattctggaagatatcgtgctgaccctgacactgtttgaggacagagagatgatcgaggaacggctgaaaacctatgcccacctgttcgacgacaaagtgatgaagcagctgaagcggcggagatacaccggctggggcaggctgagccggaagctgatcaacggcatccgggacaagcagtccggcaagacaatcctggatttcctgaagtccgacggcttcgccaacagaaacttcatgcagctgatccacgacgacagcctgacctttaaagaggacatccagaaagcccaggtgtccggccagggcgatagcctgcacgagcacattgccaatctggccggcagccccgccattaagaagggcatcctgcagacagtgaaggtggtggacgagctcgtgaaagtgatgggccggcacaagcccgagaacatcgtgatcgaaatggccagagagaaccagaccacccagaagggacagaagaacagccgcgagagaatgaagcggatcgaagagggcatcaaagagctgggcagccagatcctgaaagaacaccccgtggaaaacacccagctgcagaacgagaagctgtacctgtactacctgcagaatgggcgggatatgtacgtggaccaggaactggacatcaaccggctgtccgactacgatgtggacgctatcgtgcctcagagctttctgaaggacgactccatcgacaacaaggtgctgaccagaagcgacaagaaccggggcaagagcgacaacgtgccctccgaagaggtcgtgaagaagatgaagaactactggcggcagctgctgaacgccaagctgattacccagagaaagttcgacaatctgaccaaggccgagagaggcggcctgagcgaactggataaggccggcttcatcaagagacagctggtggaaacccggcagatcacaaagcacgtggcacagatcctggactcccggatgaacactaagtacgacgagaatgacaagctgatccgggaagtgaaagtgatcaccctgaagtccaagctggtgtccgatttccggaaggatttccagttttacaaagtgcgcgagatcaacaactaccaccacgcccacgacgcctacctgaacgccgtcgtgggaaccgccctgatcaaaaagtaccctaagctggaaagcgagttcgtgtacggcgactacaaggtgtacgacgtgcggaagatgatcgccaagagcgagcaggaaatcggcaaggctaccgccaagtacttcttctacagcaacatcatgaactttttcaagaccgagattaccctggccaacggcgagatccggaagcggcctctgatcgagacaaacggcgaaaccggggagatcgtgtgggataagggccgggattttgccaccgtgcggaaagtgctgagcatgccccaagtgaatatcgtgaaaaagaccgaggtgcagacaggcggcttcagcaaagagtctatcctgcccaagaggaacagcgataagctgatcgccagaaagaaggactgggaccctaagaagtacggcggcttcgacagccccaccgtggcctattctgtgctggtggtggccaaagtggaaaagggcaagtccaagaaactgaagagtgtgaaagagctgctggggatcaccatcatggaaagaagcagcttcgagaagaatcccatcgactttctggaagccaagggctacaaagaagtgaaaaaggacctgatcatcaagctgcctaagtactccctgttcgagctggaaaacggccggaagagaatgctggcctctgccggcgaactgcagaagggaaacgaactggccctgccctccaaatatgtgaacttcctgtacctggccagccactatgagaagctgaagggctcccccgaggataatgagcagaaacagctgtttgtggaacagcacaagcactacctggacgagatcatcgagcagatcagcgagttctccaagagagtgatcctggccgacgctaatctggacaaagtgctgtccgcctacaacaagcaccgggataagcccatcagagagcaggccgagaatatcatccacctgtttaccctgaccaatctgggagcccctgccgccttcaagtactttgacaccaccatcgaccggaagaggtacaccagcaccaaagaggtgctggacgccaccctgatccaccagagcatcaccggcctgtacgagacacggatcgacctgtctcagctgggaggtgactccggcggcagcgaggccgccgctaaagaggccgccgccaaggaagccgctgccaagagcggcggatctaccctgaacatcgaggacgagtacaggctgcacgagaccagcaaggagcccgacgtgagcctgggcagcacctggctgagcgatttccctcaggcttgggccgagaccggcggcatgggcctggccgtgcggcaggcccccctgattatccccctgaaggccaccagcacccccgtgagcatcaagcagtacccaatgtcccaggaggccaggctgggcatcaagcctcacatccagaggctgctggaccagggcatcctggtgccatgccagtccccctggaacacccctctgctgcccgtgaagaagcctggcaccaacgactaccggcccgtgcaggacctgagagaagtgaacaagcgggtggaggacatccacccaaccgtgcccaacccttacaacctgctgtccggcctgccccccagccaccagtggtacaccgtgctggacctgaaggacgccttcttctgcctgagactgcaccccacctctcagcccctgttcgccttcgagtggcgcgaccccgagatgggcatcagcggccagctgacctggaccagactgccacagggctttaagaatagcccaaccctgtttaacgaggccctgcacagggacctggccgacttcaggatccagcaccccgacctgattctgctgcagtacgtggacgacctgctgctggccgctaccagcgagctggactgccagcagggcaccagagccctgctgcagaccctgggcaacctgggctacagagccagcgccaagaaggcccagatctgtcagaagcaggtgaagtatctgggctacctgctgaaggaaggccagagatggctgaccgaggccagaaaggagactgtgatgggccagcccacccccaagacccccaggcagctgcgggagttcctgggcaaggccggcttttgcagactgtttatccctggcttcgccgagatggccgccccactgtaccctctgaccaagcctggcaccctgtttaactggggccccgaccagcagaaggcctaccaggagatcaagcaggccctgctgaccgcccccgccctgggcctgcccgacctgaccaagcctttcgagctgttcgtggacgagaagcagggatacgccaaaggcgtgctgacccagaagctgggcccctggcggaggcccgtggcctacctgagcaaaaaactggaccctgtggccgccggctggcccccatgcctgcggatggtggccgccatcgctgtgctgaccaaggacgccggcaagctgaccatgggccagcccctggtgatcctggcccctcacgccgtggaggctctggtgaagcagcctccagacaggtggctgtccaacgccaggatgacccactaccaggccctgctgctggacaccgaccgggtgcagttcggccctgtggtggccctgaaccccgccaccctgctgcctctgccagaggagggcctgcagcacaactgcctggacatcctggccgaggcccacggc

SEQ ID NO: 137 - protein, 2066 aa, synthetic construct
  REGION 1..2066: note = Description of Artificial Sequence: Synthetic polypeptide
DKKYSIGLDIGTNSVGWAVITDEYKVPSKKFKVLGNTDRHSIKKNLIGALLFDSGETAEATRLKRTARRRYTRRKNRICYLQEIFSNEMAKVDDSFFHRLEESFLVEEDKKHERHPIFGNIVDEVAYHEKYPTIYHLRKKLVDSTDKADLRLIYLALAHMIKFRGHFLIEGDLNPDNSDVDKLFIQLVQTYNQLFEENPINASGVDAKAILSARLSKSRRLENLIAQLPGEKKNGLFGNLIALSLGLTPNFKSNFDLAEDAKLQLSKDTYDDDLDNLLAQIGDQYADLFLAAKNLSDAILLSDILRVNTEITKAPLSASMIKRYDEHHQDLTLLKALVRQQLPEKYKEIFFDQSKNGYAGYIDGGASQEEFYKFIKPILEKMDGTEELLVKLNREDLLRKQRTFDNGSIPHQIHLGELHAILRRQEDFYPFLKDNREKIEKILTFRIPYYVGPLARGNSRFAWMTRKSEETITPWNFEEVVDKGASAQSFIERMTNFDKNLPNEKVLPKHSLLYEYFTVYNELTKVKYVTEGMRKPAFLSGEQKKAIVDLLFKTNRKVTVKQLKEDYFKKIECFDSVEISGVEDRFNASLGTYHDLLKIIKDKDFLDNEENEDILEDIVLTLTLFEDREMIEERLKTYAHLFDDKVMKQLKRRRYTGWGRLSRKLINGIRDKQSGKTILDFLKSDGFANRNFMQLIHDDSLTFKEDIQKAQVSGQGDSLHEHIANLAGSPAIKKGILQTVKVVDELVKVMGRHKPENIVIEMARENQTTQKGQKNSRERMKRIEEGIKELGSQILKEHPVENTQLQNEKLYLYYLQNGRDMYVDQELDINRLSDYDVDAIVPQSFLKDDSIDNKVLTRSDKNRGKSDNVPSEEVVKKMKNYWRQLLNAKLITQRKFDNLTKAERGGLSELDKAGFIKRQLVETRQITKHVAQILDSRMNTKYDENDKLIREVKVITLKSKLVSDFRKDFQFYKVREINNYHHAHDAYLNAVVGTALIKKYPKLESEFVYGDYKVYDVRKMIAKSEQEIGKATAKYFFYSNIMNFFKTEITLANGEIRKRPLIETNGETGEIVWDKGRDFATVRKVLSMPQVNIVKKTEVQTGGFSKESILPKRNSDKLIARKKDWDPKKYGGFDSPTVAYSVLVVAKVEKGKSKKLKSVKELLGITIMERSSFEKNPIDFLEAKGYKEVKKDLIIKLPKYSLFELENGRKRMLASAGELQKGNELALPSKYVNFLYLASHYEKLKGSPEDNEQKQLFVEQHKHYLDEIIEQISEFSKRVILADANLDKVLSAYNKHRDKPIREQAENIIHLFTLTNLGAPAAFKYFDTTIDRKRYTSTKEVLDATLIHQSITGLYETRIDLSQLGGDAEAAAKEAAAKEAAAKEAAAKATLNIEDEYRLHETSKEPDVSLGSTWLSDFPQAWAETGGMGLAVRQAPLIIPLKATSTPVSIKQYPMSQEARLGIKPHIQRLLDQGILVPCQSPWNTPLLPVKKPGTNDYRPVQDLREVNKRVEDIHPTVPNPYNLLSGLPPSHQWYTVLDLKDAFFCLRLHPTSQPLFAFEWRDPEMGISGQLTWTRLPQGFKNSPTLFNEALHRDLADFRIQHPDLILLQYVDDLLLAATSELDCQQGTRALLQTLGNLGYRASAKKAQICQKQVKYLGYLLKEGQRWLTEARKETVMGQPTPKTPRQLREFLGKAGFCRLFIPGFAEMAAPLYPLTKPGTLFNWGPDQQKAYQEIKQALLTAPALGLPDLTKPFELFVDEKQGYAKGVLTQKLGPWRRPVAYLSKKLDPVAAGWPPCLRMVAAIAVLTKDAGKLTMGQPLVILAPHAVEALVKQPPDRWLSNARMTHYQALLLDTDRVQFGPVVALNPATLLPLPEEGLQHNCLDILAEAHGTRPDLTDQPLPDADHTWYTDGSSLLQEGQRKAGAAVTTETEVIWAKALPAGTSAQRAELIALTQALKMAEGKKLNVYTDSRYAFATAHIHGEIYRRRGWLTSEGKEIKNKDEILALLKALFLPKRLSIIHCPGHQKGHSAEARGNRMADQAARKAAITETPDTSTLLIENSSP

SEQ ID NO: 138 - DNA, 6198 bp, synthetic construct
  misc_feature 1..6198: note = Description of Artificial Sequence: Synthetic polynucleotide
  source 1..6198: mol_type = other DNA
gacaagaagtacagcatcggcctggacatcggcaccaactctgtgggctgggccgtgatcaccgacgagtacaaggtgcccagcaagaaattcaaggtgctgggcaacaccgaccggcacagcatcaagaagaacctgatcggagccctgctgttcgacagcggcgaaacagccgaggccacccggctgaagagaaccgccagaagaagatacaccagacggaagaaccggatctgctatctgcaagagatcttcagcaacgagatggccaaggtggacgacagcttcttccacagactggaagagtccttcctggtggaagaggataagaagcacgagcggcaccccatcttcggcaacatcgtggacgaggtggcctaccacgagaagtaccccaccatctaccacctgagaaagaaactggtggacagcaccgacaaggccgacctgcggctgatctatctggccctggcccacatgatcaagttccggggccacttcctgatcgagggcgacctgaaccccgacaacagcgacgtggacaagctgttcatccagctggtgcagacctacaaccagctgttcgaggaaaaccccatcaacgccagcggcgtggacgccaaggccatcctgtctgccagactgagcaagagcagacggctggaaaatctgatcgcccagctgcccggcgagaagaagaatggcctgttcggaaacctgattgccctgagcctgggcctgacccccaacttcaagagcaacttcgacctggccgaggatgccaaactgcagctgagcaaggacacctacgacgacgacctggacaacctgctggcccagatcggcgaccagtacgccgacctgtttctggccgccaagaacctgtccgacgccatcctgctgagcgacatcctgagagtgaacaccgagatcaccaaggcccccctgagcgcctctatgatcaagagatacgacgagcaccaccaggacctgaccctgctgaaagctctcgtgcggcagcagctgcctgagaagtacaaagagattttcttcgaccagagcaagaacggctacgccggctacattgacggcggagccagccaggaagagttctacaagttcatcaagcccatcctggaaaagatggacggcaccgaggaactgctcgtgaagctgaacagagaggacctgctgcggaagcagcggaccttcgacaacggcagcatcccccaccagatccacctgggagagctgcacgccattctgcggcggcaggaagatttttacccattcctgaaggacaaccgggaaaagatcgagaagatcctgaccttccgcatcccctactacgtgggccctctggccaggggaaacagcagattcgcctggatgaccagaaagagcgaggaaaccatcaccccctggaacttcgaggaagtggtggacaagggcgcttccgcccagagcttcatcgagcggatgaccaacttcgataagaacctgcccaacgagaaggtgctgcccaagcacagcctgctgtacgagtacttcaccgtgtataacgagctgaccaaagtgaaatacgtgaccgagggaatgagaaagcccgccttcctgagcggcgagcagaaaaaggccatcgtggacctgctgttcaagaccaaccggaaagtgaccgtgaagcagctgaaagaggactacttcaagaaaatcgagtgcttcgactccgtggaaatctccggcgtggaagatcggttcaacgcctccctgggcacataccacgatctgctgaaaattatcaaggacaaggacttcctggacaatgaggaaaacgaggacattctggaagatatcgtgctgaccctgacactgtttgaggacagagagatgatcgaggaacggctgaaaacctatgcccacctgttcgacgacaaagtgatgaagcagctgaagcggcggagatacaccggctggggcaggctgagccggaagctgatcaacggcatccgggacaagcagtccggcaagacaatcctggatttcctgaagtccgacggcttcgccaacagaaacttcatgcagctgatccacgacgacagcctgacctttaaagaggacatccagaaagcccaggtgtccggccagggcgatagcctgcacgagcacattgccaatctggccggcagccccgccattaagaagggcatcctgcagacagtgaaggtggtggacgagctcgtgaaagtgatgggccggcacaagcccgagaacatcgtgatcgaaatggccagagagaaccagaccacccagaagggacagaagaacagccgcgagagaatgaagcggatcgaagagggcatcaaagagctgggcagccagatcctgaaagaacaccccgtggaaaacacccagctgcagaacgagaagctgtacctgtactacctgcagaatgggcgggatatgtacgtggaccaggaactggacatcaaccggctgtccgactacgatgtggacgctatcgtgcctcagagctttctgaaggacgactccatcgacaacaaggtgctgaccagaagcgacaagaaccggggcaagagcgacaacgtgccctccgaagaggtcgtgaagaagatgaagaactactggcggcagctgctgaacgccaagctgattacccagagaaagttcgacaatctgaccaaggccgagagaggcggcctgagcgaactggataaggccggcttcatcaagagacagctggtggaaacccggcagatcacaaagcacgtggcacagatcctggactcccggatgaacactaagtacgacgagaatgacaagctgatccgggaagtgaaagtgatcaccctgaagtccaagctggtgtccgatttccggaaggatttccagttttacaaagtgcgcgagatcaacaactaccaccacgcccacgacgcctacctgaacgccgtcgtgggaaccgccctgatcaaaaagtaccctaagctggaaagcgagttcgtgtacggcgactacaaggtgtacgacgtgcggaagatgatcgccaagagcgagcaggaaatcggcaaggctaccgccaagtacttcttctacagcaacatcatgaactttttcaagaccgagattaccctggccaacggcgagatccggaagcggcctctgatcgagacaaacggcgaaaccggggagatcgtgtgggataagggccgggattttgccaccgtgcggaaagtgctgagcatgccccaagtgaatatcgtgaaaaagaccgaggtgcagacaggcggcttcagcaaagagtctatcctgcccaagaggaacagcgataagctgatcgccagaaagaaggactgggaccctaagaagtacggcggcttcgacagccccaccgtggcctattctgtgctggtggtggccaaagtggaaaagggcaagtccaagaaactgaagagtgtgaaagagctgctggggatcaccatcatggaaagaagcagcttcgagaagaatcccatcgactttctggaagccaagggctacaaagaagtgaaaaaggacctgatcatcaagctgcctaagtactccctgttcgagctggaaaacggccggaagagaatgctggcctctgccggcgaactgcagaagggaaacgaactggccctgccctccaaatatgtgaacttcctgtacctggccagccactatgagaagctgaagggctcccccgaggataatgagcagaaacagctgtttgtggaacagcacaagcactacctggacgagatcatcgagcagatcagcgagttctccaagagagtgatcctggccgacgctaatctggacaaagtgctgtccgcctacaacaagcaccgggataagcccatcagagagcaggccgagaatatcatccacctgtttaccctgaccaatctgggagcccctgccgccttcaagtactttgacaccaccatcgaccggaagaggtacaccagcaccaaagaggtgctggacgccaccctgatccaccagagcatcaccggcctgtacgagacacggatcgacctgtctcagctgggaggtgacgccgaggccgccgccaaggaagccgctgccaaggaagccgccgctaaagaggccgctgccaaggccaccctgaacatcgaggacgagtacaggctgcacgagaccagcaaggagcccgacgtgagcctgggcagcacctggctgagcgatttccctcaggcttgggccgagaccggcggcatgggcctggccgtgcggcaggcccccctgattatccccctgaaggccaccagcacccccgtgagcatcaagcagtacccaatgtcccaggaggccaggctgggcatcaagcctcacatccagaggctgctggaccagggcatcctggtgccatgccagtccccctggaacacccctctgctgcccgtgaagaagcctggcaccaacgactaccggcccgtgcaggacctgagagaagtgaacaagcgggtggaggacatccacccaaccgtgcccaacccttacaacctgctgtccggcctgccccccagccaccagtggtacaccgtgctggacctgaaggacgccttcttctgcctgagactgcaccccacctctcagcccctgttcgccttcgagtggcgcgaccccgagatgggcatcagcggccagctgacctggaccagactgccacagggctttaagaatagcccaaccctgtttaacgaggccctgcacagggacctggccgacttcaggatccagcaccccgacctgattctgctgcagtacgtggacgacctgctgctggccgctaccagcgagctggactgccagcagggcaccagagccctgctgcagaccctgggcaacctgggctacagagccagcgccaagaaggcccagatctgtcagaagcaggtgaagtatctgggctacctgctgaaggaaggccagagatggctgaccgaggccagaaaggagactgtgatgggccagcccacccccaagacccccaggcagctgcgggagttcctgggcaaggccggcttttgcagactgtttatccctggcttcgccgagatggccgccccactgtaccctctgaccaagcctggcaccctgtttaactggggccccgaccagcagaaggcctaccaggagatcaagcaggccctgctgaccgcccccgccctgggcctgcccgacctgaccaagcctttcgagctgttcgtggacgagaagcagggatacgccaaaggcgtgctgacccagaagctgggcccctggcggaggcccgtggcctacctgagcaaaaaactggaccctgtggccgccggctggcccccatgcctgcggatggtggccgccatcgctgtgctgaccaaggacgccggcaagctgaccatgggccagcccctggtgatcctggcccctcacgccgtggaggctctggtgaagcagcctccagacaggtggctgtccaacgccaggatgacccactaccaggccctgctgctggacaccgaccgggtgcagttcggccctgtggtggccctgaaccccgccaccctgctgcctctgccagaggagggcctgcagcacaactgcctggacatcctggccgaggcccacggcaccaggcccgacctgaccgaccagcccctgcctgacgccgaccacacctggtacaccgacggcagctccctgctgcaggagggccagaggaaggccggcgccgccgtgaccaccgagaccgaggtgatctgggccaaagccctgcctgccggcacctccgcccagcgggccgagctgatcgccctgacccaggccctgaagatggctgagggcaagaagctgaacgtgtacaccgattccagatacgccttcgccaccgcccacatccacggcgagatctacagaagaaggggctggctgacctccgagggcaaggagatcaagaacaaggacgagattctggccctgctgaaggccctgttcctgcctaagagactgagcatcatccactgtcccggccaccagaagggccacagcgccgaggccagaggcaatagaatggccgaccaggccgccagaaaggccgccatcaccgagacccccgacaccagcaccctgctgatcgagaacagcagcccc

SEQ ID NO: 139 - RNA, 6198 nt, synthetic construct
  misc_feature 1..6198: note = Description of Artificial Sequence: Synthetic polynucleotide
  source 1..6198: mol_type = other RNA
gacaagaagtacagcatcggcctggacatcggcaccaactctgtgggctgggccgtgatcaccgacgagtacaaggtgcccagcaagaaattcaaggtgctgggcaacaccgaccggcacagcatcaagaagaacctgatcggagccctgctgttcgacagcggcgaaacagccgaggccacccggctgaagagaaccgccagaagaagatacaccagacggaagaaccggatctgctatctgcaagagatcttcagcaacgagatggccaaggtggacgacagcttcttccacagactggaagagtccttcctggtggaagaggataagaagcacgagcggcaccccatcttcggcaacatcgtggacgaggtggcctaccacgagaagtaccccaccatctaccacctgagaaagaaactggtggacagcaccgacaaggccgacctgcggctgatctatctggccctggcccacatgatcaagttccggggccacttcctgatcgagggcgacctgaaccccgacaacagcgacgtggacaagctgttcatccagctggtgcagacctacaaccagctgttcgaggaaaaccccatcaacgccagcggcgtggacgccaaggccatcctgtctgccagactgagcaagagcagacggctggaaaatctgatcgcccagctgcccggcgagaagaagaatggcctgttcggaaacctgattgccctgagcctgggcctgacccccaacttcaagagcaacttcgacctggccgaggatgccaaactgcagctgagcaaggacacctacgacgacgacctggacaacctgctggcccagatcggcgaccagtacgccgacctgtttctggccgccaagaacctgtccgacgccatcctgctgagcgacatcctgagagtgaacaccgagatcaccaaggcccccctgagcgcctctatgatcaagagatacgacgagcaccaccaggacctgaccctgctgaaagctctcgtgcggcagcagctgcctgagaagtacaaagagattttcttcgaccagagcaagaacggctacgccggctacattgacggcggagccagccaggaagagttctacaagttcatcaagcccatcctggaaaagatggacggcaccgaggaactgctcgtgaagctgaacagagaggacctgctgcggaagcagcggaccttcgacaacggcagcatcccccaccagatccacctgggagagctgcacgccattctgcggcggcaggaagatttttacccattcctgaaggacaaccgggaaaagatcgagaagatcctgaccttccgcatcccctactacgtgggccctctggccaggggaaacagcagattcgcctggatgaccagaaagagcgaggaaaccatcaccccctggaacttcgaggaagtggtggacaagggcgcttccgcccagagcttcatcgagcggatgaccaacttcgataagaacctgcccaacgagaaggtgctgcccaagcacagcctgctgtacgagtacttcaccgtgtataacgagctgaccaaagtgaaatacgtgaccgagggaatgagaaagcccgccttcctgagcggcgagcagaaaaaggccatcgtggacctgctgttcaagaccaaccggaaagtgaccgtgaagcagctgaaagaggactacttcaagaaaatcgagtgcttcgactccgtggaaatctccggcgtggaagatcggttcaacgcctccctgggcacataccacgatctgctgaaaattatcaaggacaaggacttcctggacaatgaggaaaacgaggacattctggaagatatcgtgctgaccctgacactgtttgaggacagagagatgatcgaggaacggctgaaaacctatgcccacctgttcgacgacaaagtgatgaagcagctgaagcggcggagatacaccggctggggcaggctgagccggaagctgatcaacggcatccgggacaagcagtccggcaagacaatcctggatttcctgaagtccgacggcttcgccaacagaaacttcatgcagctgatccacgacgacagcctgacctttaaagaggacatccagaaagcccaggtgtccggccagggcgatagcctgcacgagcacattgccaatctggccggcagccccgccattaagaagggcatcctgcagacagtgaaggtggtggacgagctcgtgaaagtgatgggccggcacaagcccgagaacatcgtgatcgaaatggccagagagaaccagaccacccagaagggacagaagaacagccgcgagagaatgaagcggatcgaagagggcatcaaagagctgggcagccagatcctgaaagaacaccccgtggaaaacacccagctgcagaacgagaagctgtacctgtactacctgcagaatgggcgggatatgtacgtggaccaggaactggacatcaaccggctgtccgactacgatgtggacgctatcgtgcctcagagctttctgaaggacgactccatcgacaacaaggtgctgaccagaagcgacaagaaccggggcaagagcgacaacgtgccctccgaagaggtcgtgaagaagatgaagaactactggcggcagctgctgaacgccaagctgattacccagagaaagttcgacaatctgaccaaggccgagagaggcggcctgagcgaactggataaggccggcttcatcaagagacagctggtggaaacccggcagatcacaaagcacgtggcacagatcctggactcccggatgaacactaagtacgacgagaatgacaagctgatccgggaagtgaaagtgatcaccctgaagtccaagctggtgtccgatttccggaaggatttccagttttacaaagtgcgcgagatcaacaactaccaccacgcccacgacgcctacctgaacgccgtcgtgggaaccgccctgatcaaaaagtaccctaagctggaaagcgagttcgtgtacggcgactacaaggtgtacgacgtgcggaagatgatcgccaagagcgagcaggaaatcggcaaggctaccgccaagtacttcttctacagcaacatcatgaactttttcaagaccgagattaccctggccaacggcgagatccggaagcggcctctgatcgagacaaacggcgaaaccggggagatcgtgtgggataagggccgggattttgccaccgtgcggaaagtgctgagcatgccccaagtgaatatcgtgaaaaagaccgaggtgcagacaggcggcttcagcaaagagtctatcctgcccaagaggaacagcgataagctgatcgccagaaagaaggactgggaccctaagaagtacggcggcttcgacagccccaccgtggcctattctgtgctggtggtggccaaagtggaaaagggcaagtccaagaaactgaagagtgtgaaagagctgctggggatcaccatcatggaaagaagcagcttcgagaagaatcccatcgactttctggaagccaagggctacaaagaagtgaaaaaggacctgatcatcaagctgcctaagtactccctgttcgagctggaaaacggccggaagagaatgctggcctctgccggcgaactgcagaagggaaacgaactggccctgccctccaaatatgtgaacttcctgtacctggccagccactatgagaagctgaagggctcccccgaggataatgagcagaaacagctgtttgtggaacagcacaagcactacctggacgagatcatcgagcagatcagcgagttctccaagagagtgatcctggccgacgctaatctggacaaagtgctgtccgcctacaacaagcaccgggataagcccatcagagagcaggccgagaatatcatccacctgtttaccctgaccaatctgggagcccctgccgccttcaagtactttgacaccaccatcgaccggaagaggtacaccagcaccaaagaggtgctggacgccaccctgatccaccagagcatcaccggcctgtacgagacacggatcgacctgtctcagctgggaggtgacgccgaggccgccgccaaggaagccgctgccaaggaagccgccgctaaagaggccgctgccaaggccaccctgaacatcgaggacgagtacaggctgcacgagaccagcaaggagcccgacgtgagcctgggcagcacctggctgagcgatttccctcaggcttgggccgagaccggcggcatgggcctggccgtgcggcaggcccccctgattatccccctgaaggccaccagcacccccgtgagcatcaagcagtacccaatgtcccaggaggccaggctgggcatcaagcctcacatccagaggctgctggaccagggcatcctggtgccatgccagtccccctggaacacccctctgctgcccgtgaagaagcctggcaccaacgactaccggcccgtgcaggacctgagagaagtgaacaagcgggtggaggacatccacccaaccgtgcccaacccttacaacctgctgtccggcctgccccccagccaccagtggtacaccgtgctggacctgaaggacgccttcttctgcctgagactgcaccccacctctcagcccctgttcgccttcgagtggcgcgaccccgagatgggcatcagcggccagctgacctggaccagactgccacagggctttaagaatagcccaaccctgtttaacgaggccctgcacagggacctggccgacttcaggatccagcaccccgacctgattctgctgcagtacgtggacgacctgctgctggccgctaccagcgagctggactgccagcagggcaccagagccctgctgcagaccctgggcaacctgggctacagagccagcgccaagaaggcccagatctgtcagaagcaggtgaagtatctgggctacctgctgaaggaaggccagagatggctgaccgaggccagaaaggagactgtgatgggccagcccacccccaagacccccaggcagctgcgggagttcctgggcaaggccggcttttgcagactgtttatccctggcttcgccgagatggccgccccactgtaccctctgaccaagcctggcaccctgtttaactggggccccgaccagcagaaggcctaccaggagatcaagcaggccctgctgaccgcccccgccctgggcctgcccgacctgaccaagcctttcgagctgttcgtggacgagaagcagggatacgccaaaggcgtgctgacccagaagctgggcccctggcggaggcccgtggcctacctgagcaaaaaactggaccctgtggccgccggctggcccccatgcctgcggatggtggccgccatcgctgtgctgaccaaggacgccggcaagctgaccatgggccagcccctggtgatcctggcccctcacgccgtggaggctctggtgaagcagcctccagacaggtggctgtccaacgccaggatgacccactaccaggccctgctgctggacaccgaccgggtgcagttcggccctgtggtggccctgaaccccgccaccctgctgcctctgccagaggagggcctgcagcacaactgcctggacatcctggccgaggcccacggcaccaggcccgacctgaccgaccagcccctgcctgacgccgaccacacctggtacaccgacggcagctccctgctgcaggagggccagaggaaggccggcgccgccgtgaccaccgagaccgaggtgatctgggccaaagccctgcctgccggcacctccgcccagcgggccgagctgatcgccctgacccaggccctgaagatggctgagggcaagaagctgaacgtgtacaccgattccagatacgccttcgccaccgcccacatccacggcgagatctacagaagaaggggctggctgacctccgagggcaaggagatcaagaacaaggacgagattctggccctgctgaaggccctgttcctgcctaagagactgagcatcatccactgtcccggccaccagaagggccacagcgccgaggccagaggcaatagaatggccgaccaggccgccagaaaggccgccatcaccgagacccccgacaccagcaccctgctgatcgagaacagcagcccc

SEQ ID NO: 140 - protein, 1893 aa, synthetic construct
  REGION 1..1893: note = Description of Artificial Sequence: Synthetic polypeptide
DKKYSIGLDIGTNSVGWAVITDEYKVPSKKFKVLGNTDRHSIKKNLIGALLFDSGETAEATRLKRTARRRYTRRKNRICYLQEIFSNEMAKVDDSFFHRLEESFLVEEDKKHERHPIFGNIVDEVAYHEKYPTIYHLRKKLVDSTDKADLRLIYLALAHMIKFRGHFLIEGDLNPDNSDVDKLFIQLVQTYNQLFEENPINASGVDAKAILSARLSKSRRLENLIAQLPGEKKNGLFGNLIALSLGLTPNFKSNFDLAEDAKLQLSKDTYDDDLDNLLAQIGDQYADLFLAAKNLSDAILLSDILRVNTEITKAPLSASMIKRYDEHHQDLTLLKALVRQQLPEKYKEIFFDQSKNGYAGYIDGGASQEEFYKFIKPILEKMDGTEELLVKLNREDLLRKQRTFDNGSIPHQIHLGELHAILRRQEDFYPFLKDNREKIEKILTFRIPYYVGPLARGNSRFAWMTRKSEETITPWNFEEVVDKGASAQSFIERMTNFDKNLPNEKVLPKHSLLYEYFTVYNELTKVKYVTEGMRKPAFLSGEQKKAIVDLLFKTNRKVTVKQLKEDYFKKIECFDSVEISGVEDRFNASLGTYHDLLKIIKDKDFLDNEENEDILEDIVLTLTLFEDREMIEERLKTYAHLFDDKVMKQLKRRRYTGWGRLSRKLINGIRDKQSGKTILDFLKSDGFANRNFMQLIHDDSLTFKEDIQKAQVSGQGDSLHEHIANLAGSPAIKKGILQTVKVVDELVKVMGRHKPENIVIEMARENQTTQKGQKNSRERMKRIEEGIKELGSQILKEHPVENTQLQNEKLYLYYLQNGRDMYVDQELDINRLSDYDVDAIVPQSFLKDDSIDNKVLTRSDKNRGKSDNVPSEEVVKKMKNYWRQLLNAKLITQRKFDNLTKAERGGLSELDKAGFIKRQLVETRQITKHVAQILDSRMNTKYDENDKLIREVKVITLKSKLVSDFRKDFQFYKVREINNYHHAHDAYLNAVVGTALIKKYPKLESEFVYGDYKVYDVRKMIAKSEQEIGKATAKYFFYSNIMNFFKTEITLANGEIRKRPLIETNGETGEIVWDKGRDFATVRKVLSMPQVNIVKKTEVQTGGFSKESILPKRNSDKLIARKKDWDPKKYGGFDSPTVAYSVLVVAKVEKGKSKKLKSVKELLGITIMERSSFEKNPIDFLEAKGYKEVKKDLIIKLPKYSLFELENGRKRMLASAGELQKGNELALPSKYVNFLYLASHYEKLKGSPEDNEQKQLFVEQHKHYLDEIIEQISEFSKRVILADANLDKVLSAYNKHRDKPIREQAENIIHLFTLTNLGAPAAFKYFDTTIDRKRYTSTKEVLDATLIHQSITGLYETRIDLSQLGGDAEAAAKEAAAKEAAAKEAAAKATLNIEDEYRLHETSKEPDVSLGSTWLSDFPQAWAETGGMGLAVRQAPLIIPLKATSTPVSIKQYPMSQEARLGIKPHIQRLLDQGILVPCQSPWNTPLLPVKKPGTNDYRPVQDLREVNKRVEDIHPTVPNPYNLLSGLPPSHQWYTVLDLKDAFFCLRLHPTSQPLFAFEWRDPEMGISGQLTWTRLPQGFKNSPTLFNEALHRDLADFRIQHPDLILLQYVDDLLLAATSELDCQQGTRALLQTLGNLGYRASAKKAQICQKQVKYLGYLLKEGQRWLTEARKETVMGQPTPKTPRQLREFLGKAGFCRLFIPGFAEMAAPLYPLTKPGTLFNWGPDQQKAYQEIKQALLTAPALGLPDLTKPFELFVDEKQGYAKGVLTQKLGPWRRPVAYLSKKLDPVAAGWPPCLRMVAAIAVLTKDAGKLTMGQPLVILAPHAVEALVKQPPDRWLSNARMTHYQALLLDTDRVQFGPVVALNPATLLPLPEEGLQHNCLDILAEAHG

SEQ ID NO: 141 - DNA, 5679 bp, synthetic construct
  misc_feature 1..5679: note = Description of Artificial Sequence: Synthetic polynucleotide
  source 1..5679: mol_type = other DNA
gacaagaagtacagcatcggcctggacatcggcaccaactctgtgggctgggccgtgatcaccgacgagtacaaggtgcccagcaagaaattcaaggtgctgggcaacaccgaccggcacagcatcaagaagaacctgatcggagccctgctgttcgacagcggcgaaacagccgaggccacccggctgaagagaaccgccagaagaagatacaccagacggaagaaccggatctgctatctgcaagagatcttcagcaacgagatggccaaggtggacgacagcttcttccacagactggaagagtccttcctggtggaagaggataagaagcacgagcggcaccccatcttcggcaacatcgtggacgaggtggcctaccacgagaagtaccccaccatctaccacctgagaaagaaactggtggacagcaccgacaaggccgacctgcggctgatctatctggccctggcccacatgatcaagttccggggccacttcctgatcgagggcgacctgaaccccgacaacagcgacgtggacaagctgttcatccagctggtgcagacctacaaccagctgttcgaggaaaaccccatcaacgccagcggcgtggacgccaaggccatcctgtctgccagactgagcaagagcagacggctggaaaatctgatcgcccagctgcccggcgagaagaagaatggcctgttcggaaacctgattgccctgagcctgggcctgacccccaacttcaagagcaacttcgacctggccgaggatgccaaactgcagctgagcaaggacacctacgacgacgacctggacaacctgctggcccagatcggcgaccagtacgccgacctgtttctggccgccaagaacctgtccgacgccatcctgctgagcgacatcctgagagtgaacaccgagatcaccaaggcccccctgagcgcctctatgatcaagagatacgacgagcaccaccaggacctgaccctgctgaaagctctcgtgcggcagcagctgcctgagaagtacaaagagattttcttcgaccagagcaagaacggctacgccggctacattgacggcggagccagccaggaagagttctacaagttcatcaagcccatcctggaaaagatggacggcaccgaggaactgctcgtgaagctgaacagagaggacctgctgcggaagcagcggaccttcgacaacggcagcatcccccaccagatccacctgggagagctgcacgccattctgcggcggcaggaagatttttacccattcctgaaggacaaccgggaaaagatcgagaagatcctgaccttccgcatcccctactacgtgggccctctggccaggggaaacagcagattcgcctggatgaccagaaagagcgaggaaaccatcaccccctggaacttcgaggaagtggtggacaagggcgcttccgcccagagcttcatcgagcggatgaccaacttcgataagaacctgcccaacgagaaggtgctgcccaagcacagcctgctgtacgagtacttcaccgtgtataacgagctgaccaaagtgaaatacgtgaccgagggaatgagaaagcccgccttcctgagcggcgagcagaaaaaggccatcgtggacctgctgttcaagaccaaccggaaagtgaccgtgaagcagctgaaagaggactacttcaagaaaatcgagtgcttcgactccgtggaaatctccggcgtggaagatcggttcaacgcctccctgggcacataccacgatctgctgaaaattatcaaggacaaggacttcctggacaatgaggaaaacgaggacattctggaagatatcgtgctgaccctgacactgtttgaggacagagagatgatcgaggaacggctgaaaacctatgcccacctgttcgacgacaaagtgatgaagcagctgaagcggcggagatacaccggctggggcaggctgagccggaagctgatcaacggcatccgggacaagcagtccggcaagacaatcctggatttcctgaagtccgacggcttcgccaacagaaacttcatgcagctgatccacgacgacagcctgacctttaaagaggacatccagaaagcccaggtgtccggccagggcgatagcctgcacgagcacattgccaatctggccggcagccccgccattaagaagggcatcctgcagacagtgaaggtggtggacgagctcgtgaaagtgatgggccggcacaagcccgagaacatcgtgatcgaaatggccagagagaaccagaccacccagaagggacagaagaacagccgcgagagaatgaagcggatcgaagagggcatcaaagagctgggcagccagatcctgaaagaacaccccgtggaaaacacccagctgcagaacgagaagctgtacctgtactacctgcagaatgggcgggatatgtacgtggaccaggaactggacatcaaccggctgtccgactacgatgtggacgctatcgtgcctcagagctttctgaaggacgactccatcgacaacaaggtgctgaccagaagcgacaagaaccggggcaagagcgacaacgtgccctccgaagaggtcgtgaagaagatgaagaactactggcggcagctgctgaacgccaagctgattacccagagaaagttcgacaatctgaccaaggccgagagaggcggcctgagcgaactggataaggccggcttcatcaagagacagctggtggaaacccggcagatcacaaagcacgtggcacagatcctggactcccggatgaacactaagtacgacgagaatgacaagctgatccgggaagtgaaagtgatcaccctgaagtccaagctggtgtccgatttccggaaggatttccagttttacaaagtgcgcgagatcaacaactaccaccacgcccacgacgcctacctgaacgccgtcgtgggaaccgccctgatcaaaaagtaccctaagctggaaagcgagttcgtgtacggcgactacaaggtgtacgacgtgcggaagatgatcgccaagagcgagcaggaaatcggcaaggctaccgccaagtacttcttctacagcaacatcatgaactttttcaagaccgagattaccctggccaacggcgagatccggaagcggcctctgatcgagacaaacggcgaaaccggggagatcgtgtgggataagggccgggattttgccaccgtgcggaaagtgctgagcatgccccaagtgaatatcgtgaaaaagaccgaggtgcagacaggcggcttcagcaaagagtctatcctgcccaagaggaacagcgataagctgatcgccagaaagaaggactgggaccctaagaagtacggcggcttcgacagccccaccgtggcctattctgtgctggtggtggccaaagtggaaaagggcaagtccaagaaactgaagagtgtgaaagagctgctggggatcaccatcatggaaagaagcagcttcgagaagaatcccatcgactttctggaagccaagggctacaaagaagtgaaaaaggacctgatcatcaagctgcctaagtactccctgttcgagctggaaaacggccggaagagaatgctggcctctgccggcgaactgcagaagggaaacgaactggccctgccctccaaatatgtgaacttcctgtacctggccagccactatgagaagctgaagggctcccccgaggataatgagcagaaacagctgtttgtggaacagcacaagcactacctggacgagatcatcgagcagatcagcgagttctccaagagagtgatcctggccgacgctaatctggacaaagtgctgtccgcctacaacaagcaccgggataagcccatcagagagcaggccgagaatatcatccacctgtttaccctgaccaatctgggagcccctgccgccttcaagtactttgacaccaccatcgaccggaagaggtacaccagcaccaaagaggtgctggacgccaccctgatccaccagagcatcaccggcctgtacgagacacggatcgacctgtctcagctgggaggtgacgccgaggccgccgccaaggaagccgctgccaaggaagccgccgctaaagaggccgctgccaaggccaccctgaacatcgaggacgagtacaggctgcacgagaccagcaaggagcccgacgtgagcctgggcagcacctggctgagcgatttccctcaggcttgggccgagaccggcggcatgggcctggccgtgcggcaggcccccctgattatccccctgaaggccaccagcacccccgtgagcatcaagcagtacccaatgtcccaggaggccaggctgggcatcaagcctcacatccagaggctgctggaccagggcatcctggtgccatgccagtccccctggaacacccctctgctgcccgtgaagaagcctggcaccaacgactaccggcccgtgcaggacctgagagaagtgaacaagcgggtggaggacatccacccaaccgtgcccaacccttacaacctgctgtccggcctgccccccagccaccagtggtacaccgtgctggacctgaaggacgccttcttctgcctgagactgcaccccacctctcagcccctgttcgccttcgagtggcgcgaccccgagatgggcatcagcggccagctgacctggaccagactgccacagggctttaagaatagcccaaccctgtttaacgaggccctgcacagggacctggccgacttcaggatccagcaccccgacctgattctgctgcagtacgtggacgacctgctgctggccgctaccagcgagctggactgccagcagggcaccagagccctgctgcagaccctgggcaacctgggctacagagccagcgccaagaaggcccagatctgtcagaagcaggtgaagtatctgggctacctgctgaaggaaggccagagatggctgaccgaggccagaaaggagactgtgatgggccagcccacccccaagacccccaggcagctgcgggagttcctgggcaaggccggcttttgcagactgtttatccctggcttcgccgagatggccgccccactgtaccctctgaccaagcctggcaccctgtttaactggggccccgaccagcagaaggcctaccaggagatcaagcaggccctgctgaccgcccccgccctgggcctgcccgacctgaccaagcctttcgagctgttcgtggacgagaagcagggatacgccaaaggcgtgctgacccagaagctgggcccctggcggaggcccgtggcctacctgagcaaaaaactggaccctgtggccgccggctggcccccatgcctgcggatggtggccgccatcgctgtgctgaccaaggacgccggcaagctgaccatgggccagcccctggtgatcctggcccctcacgccgtggaggctctggtgaagcagcctccagacaggtggctgtccaacgccaggatgacccactaccaggccctgctgctggacaccgaccgggtgcagttcggccctgtggtggccctgaaccccgccaccctgctgcctctgccagaggagggcctgcagcacaactgcctggacatcctggccgaggcccacggc

SEQ ID NO: 142 - RNA, 5679 nt, synthetic construct
  misc_feature 1..5679: note = Description of Artificial Sequence: Synthetic polynucleotide
  source 1..5679: mol_type = other RNA
gacaagaagtacagcatcggcctggacatcggcaccaactctgtgggctgggccgtgatcaccgacgagtacaaggtgcccagcaagaaattcaaggtgctgggcaacaccgaccggcacagcatcaagaagaacctgatcggagccctgctgttcgacagcggcgaaacagccgaggccacccggctgaagagaaccgccagaagaagatacaccagacggaagaaccggatctgctatctgcaagagatcttcagcaacgagatggccaaggtggacgacagcttcttccacagactggaagagtccttcctggtggaagaggataagaagcacgagcggcaccccatcttcggcaacatcgtggacgaggtggcctaccacgagaagtaccccaccatctaccacctgagaaagaaactggtggacagcaccgacaaggccgacctgcggctgatctatctggccctggcccacatgatcaagttccggggccacttcctgatcgagggcgacctgaaccccgacaacagcgacgtggacaagctgttcatccagctggtgcagacctacaaccagctgttcgaggaaaaccccatcaacgccagcggcgtggacgccaaggccatcctgtctgccagactgagcaagagcagacggctggaaaatctgatcgcccagctgcccggcgagaagaagaatggcctgttcggaaacctgattgccctgagcctgggcctgacccccaacttcaagagcaacttcgacctggccgaggatgccaaactgcagctgagcaaggacacctacgacgacgacctggacaacctgctggcccagatcggcgaccagtacgccgacctgtttctggccgccaagaacctgtccgacgccatcctgctgagcgacatcctgagagtgaacaccgagatcaccaaggcccccctgagcgcctctatgatcaagagatacgacgagcaccaccaggacctgaccctgctgaaagctctcgtgcggcagcagctgcctgagaagtacaaagagattttcttcgaccagagcaagaacggctacgccggctacattgacggcggagccagccaggaagagttctacaagttcatcaagcccatcctggaaaagatggacggcaccgaggaactgctcgtgaagctgaacagagaggacctgctgcggaagcagcggaccttcgacaacggcagcatcccccaccagatccacctgggagagctgcacgccattctgcggcggcaggaagatttttacccattcctgaaggacaaccgggaaaagatcgagaagatcctgaccttccgcatcccctactacgtgggccctctggccaggggaaacagcagattcgcctggatgaccagaaagagcgaggaaaccatcaccccctggaacttcgaggaagtggtggacaagggcgcttccgcccagagcttcatcgagcggatgaccaacttcgataagaacctgcccaacgagaaggtgctgcccaagcacagcctgctgtacgagtacttcaccgtgtataacgagctgaccaaagtgaaatacgtgaccgagggaatgagaaagcccgccttcctgagcggcgagcagaaaaaggccatcgtggacctgctgttcaagaccaaccggaaagtgaccgtgaagcagctgaaagaggactacttcaagaaaatcgagtgcttcgactccgtggaaatctccggcgtggaagatcggttcaacgcctccctgggcacataccacgatctgctgaaaattatcaaggacaaggacttcctggacaatgaggaaaacgaggacattctggaagatatcgtgctgaccctgacactgtttgaggacagagagatgatcgaggaacggctgaaaacctatgcccacctgttcgacgacaaagtgatgaagcagctgaagcggcggagatacaccggctggggcaggctgagccggaagctgatcaacggcatccgggacaagcagtccggcaagacaatcctggatttcctgaagtccgacggcttcgccaacagaaacttcatgcagctgatccacgacgacagcctgacctttaaagaggacatccagaaagcccaggtgtccggccagggcgatagcctgcacgagcacattgccaatctggccggcagccccgccattaagaagggcatcctgcagacagtgaaggtggtggacgagctcgtgaaagtgatgggccggcacaagcccgagaacatcgtgatcgaaatggccagagagaaccagaccacccagaagggacagaagaacagccgcgagagaatgaagcggatcgaagagggcatcaaagagctgggcagccagatcctgaaagaacaccccgtggaaaacacccagctgcagaacgagaagctgtacctgtactacctgcagaatgggcgggatatgtacgtggaccaggaactggacatcaaccggctgtccgactacgatgtggacgctatcgtgcctcagagctttctgaaggacgactccatcgacaacaaggtgctgaccagaagcgacaagaaccggggcaagagcgacaacgtgccctccgaagaggtcgtgaagaagatgaagaactactggcggcagctgctgaacgccaagctgattacccagagaaagttcgacaatctgaccaaggccgagagaggcggcctgagcgaactggataaggccggcttcatcaagagacagctggtggaaacccggcagatcacaaagcacgtggcacagatcctggactcccggatgaacactaagtacgacgagaatgacaagctgatccgggaagtgaaagtgatcaccctgaagtccaagctggtgtccgatttccggaaggatttccagttttacaaagtgcgcgagatcaacaactaccaccacgcccacgacgcctacctgaacgccgtcgtgggaaccgccctgatcaaaaagtaccctaagctggaaagcgagttcgtgtacggcgactacaaggtgtacgacgtgcggaagatgatcgccaagagcgagcaggaaatcggcaaggctaccgccaagtacttcttctacagcaacatcatgaactttttcaagaccgagattaccctggccaacggcgagatccggaagcggcctctgatcgagacaaacggcgaaaccggggagatcgtgtgggataagggccgggattttgccaccgtgcggaaagtgctgagcatgccccaagtgaatatcgtgaaaaagaccgaggtgcagacaggcggcttcagcaaagagtctatcctgcccaagaggaacagcgataagctgatcgccagaaagaaggactgggaccctaagaagtacggcggcttcgacagccccaccgtggcctattctgtgctggtggtggccaaagtggaaaagggcaagtccaagaaactgaagagtgtgaaagagctgctggggatcaccatcatggaaagaagcagcttcgagaagaatcccatcgactttctggaagccaagggctacaaagaagtgaaaaaggacctgatcatcaagctgcctaagtactccctgttcgagctggaaaacggccggaagagaatgctggcctctgccggcgaactgcagaagggaaacgaactggccctgccctccaaatatgtgaacttcctgtacctggccagccactatgagaagctgaagggctcccccgaggataatgagcagaaacagctgtttgtggaacagcacaagcactacctggacgagatcatcgagcagatcagcgagttctccaagagagtgatcctggccgacgctaatctggacaaagtgctgtccgcctacaacaagcaccgggataagcccatcagagagcaggccgagaatatcatccacctgtttaccctgaccaatctgggagcccctgccgccttcaagtactttgacaccaccatcgaccggaagaggtacaccagcaccaaagaggtgctggacgccaccctgatccaccagagcatcaccggcctgtacgagacacggatcgacctgtctcagctgggaggtgacgccgaggccgccgccaaggaagccgctgccaaggaagccgccgctaaagaggccgctgccaaggccaccctgaacatcgaggacgagtacaggctgcacgagaccagcaaggagcccgacgtgagcctgggcagcacctggctgagcgatttccctcaggcttgggccgagaccggcggcatgggcctggccgtgcggcaggcccccctgattatccccctgaaggccaccagcacccccgtgagcatcaagcagtacccaatgtcccaggaggccaggctgggcatcaagcctcacatccagaggctgctggaccagggcatcctggtgccatgccagtccccctggaacacccctctgctgcccgtgaagaagcctggcaccaacgactaccggcccgtgcaggacctgagagaagtgaacaagcgggtggaggacatccacccaaccgtgcccaacccttacaacctgctgtccggcctgccccccagccaccagtggtacaccgtgctggacctgaaggacgccttcttctgcctgagactgcaccccacctctcagcccctgttcgccttcgagtggcgcgaccccgagatgggcatcagcggccagctgacctggaccagactgccacagggctttaagaatagcccaaccctgtttaacgaggccctgcacagggacctggccgacttcaggatccagcaccccgacctgattctgctgcagtacgtggacgacctgctgctggccgctaccagcgagctggactgccagcagggcaccagagccctgctgcagaccctgggcaacctgggctacagagccagcgccaagaaggcccagatctgtcagaagcaggtgaagtatctgggctacctgctgaaggaaggccagagatggctgaccgaggccagaaaggagactgtgatgggccagcccacccccaagacccccaggcagctgcgggagttcctgggcaaggccggcttttgcagactgtttatccctggcttcgccgagatggccgccccactgtaccctctgaccaagcctggcaccctgtttaactggggccccgaccagcagaaggcctaccaggagatcaagcaggccctgctgaccgcccccgccctgggcctgcccgacctgaccaagcctttcgagctgttcgtggacgagaagcagggatacgccaaaggcgtgctgacccagaagctgggcccctggcggaggcccgtggcctacctgagcaaaaaactggaccctgtggccgccggctggcccccatgcctgcggatggtggccgccatcgctgtgctgaccaaggacgccggcaagctgaccatgggccagcccctggtgatcctggcccctcacgccgtggaggctctggtgaagcagcctccagacaggtggctgtccaacgccaggatgacccactaccaggccctgctgctggacaccgaccgggtgcagttcggccctgtggtggccctgaaccccgccaccctgctgcctctgccagaggagggcctgcagcacaactgcctggacatcctggccgaggcccacggc

SEQ ID NO: 143 - protein, 2082 aa, synthetic construct
  REGION 1..2082: note = Description of Artificial Sequence: Synthetic polypeptide
DKKYSIGLDIGTNSVGWAVITDEYKVPSKKFKVLGNTDRHSIKKNLIGALLFDSGETAEATRLKRTARRRYTRRKNRICYLQEIFSNEMAKVDDSFFHRLEESFLVEEDKKHERHPIFGNIVDEVAYHEKYPTIYHLRKKLVDSTDKADLRLIYLALAHMIKFRGHFLIEGDLNPDNSDVDKLFIQLVQTYNQLFEENPINASGVDAKAILSARLSKSRRLENLIAQLPGEKKNGLFGNLIALSLGLTPNFKSNFDLAEDAKLQLSKDTYDDDLDNLLAQIGDQYADLFLAAKNLSDAILLSDILRVNTEITKAPLSASMIKRYDEHHQDLTLLKALVRQQLPEKYKEIFFDQSKNGYAGYIDGGASQEEFYKFIKPILEKMDGTEELLVKLNREDLLRKQRTFDNGSIPHQIHLGELHAILRRQEDFYPFLKDNREKIEKILTFRIPYYVGPLARGNSRFAWMTRKSEETITPWNFEEVVDKGASAQSFIERMTNFDKNLPNEKVLPKHSLLYEYFTVYNELTKVKYVTEGMRKPAFLSGEQKKAIVDLLFKTNRKVTVKQLKEDYFKKIECFDSVEISGVEDRFNASLGTYHDLLKIIKDKDFLDNEENEDILEDIVLTLTLFEDREMIEERLKTYAHLFDDKVMKQLKRRRYTGWGRLSRKLINGIRDKQSGKTILDFLKSDGFANRNFMQLIHDDSLTFKEDIQKAQVSGQGDSLHEHIANLAGSPAIKKGILQTVKVVDELVKVMGRHKPENIVIEMARENQTTQKGQKNSRERMKRIEEGIKELGSQILKEHPVENTQLQNEKLYLYYLQNGRDMYVDQELDINRLSDYDVDAIVPQSFLKDDSIDNKVLTRSDKNRGKSDNVPSEEVVKKMKNYWRQLLNAKLITQRKFDNLTKAERGGLSELDKAGFIKRQLVETRQITKHVAQILDSRMNTKYDENDKLIREVKVITLKSKLVSDFRKDFQFYKVREINNYHHAHDAYLNAVVGTALIKKYPKLESEFVYGDYKVYDVRKMIAKSEQEIGKATAKYFFYSNIMNFFKTEITLANGEIRKRPLIETNGETGEIVWDKGRDFATVRKVLSMPQVNIVKKTEVQTGGFSKESILPKRNSDKLIARKKDWDPKKYGGFDSPTVAYSVLVVAKVEKGKSKKLKSVKELLGITIMERSSFEKNPIDFLEAKGYKEVKKDLIIKLPKYSLFELENGRKRMLASAGELQKGNELALPSKYVNFLYLASHYEKLKGSPEDNEQKQLFVEQHKHYLDEIIEQISEFSKRVILADANLDKVLSAYNKHRDKPIREQAENIIHLFTLTNLGAPAAFKYFDTTIDRKRYTSTKEVLDATLIHQSITGLYETRIDLSQLGGDSGGSEAAAKEAAAKEAAAKEAAAKEAAAKEAAAKSGGSTLNIEDEYRLHETSKEPDVSLGSTWLSDFPQAWAETGGMGLAVRQAPLIIPLKATSTPVSIKQYPMSQEARLGIKPHIQRLLDQGILVPCQSPWNTPLLPVKKPGTNDYRPVQDLREVNKRVEDIHPTVPNPYNLLSGLPPSHQWYTVLDLKDAFFCLRLHPTSQPLFAFEWRDPEMGISGQLTWTRLPQGFKNSPTLFNEALHRDLADFRIQHPDLILLQYVDDLLLAATSELDCQQGTRALLQTLGNLGYRASAKKAQICQKQVKYLGYLLKEGQRWLTEARKETVMGQPTPKTPRQLREFLGKAGFCRLFIPGFAEMAAPLYPLTKPGTLFNWGPDQQKAYQEIKQALLTAPALGLPDLTKPFELFVDEKQGYAKGVLTQKLGPWRRPVAYLSKKLDPVAAGWPPCLRMVAAIAVLTKDAGKLTMGQPLVILAPHAVEALVKQPPDRWLSNARMTHYQALLLDTDRVQFGPVVALNPATLLPLPEEGLQHNCLDILAEAHGTRPDLTDQPLPDADHTWYTDGSSLLQEGQRKAGAAVTTETEVIWAKALPAGTSAQRAELIALTQALKMAEGKKLNVYTDSRYAFATAHIHGEIYRRRGWLTSEGKEIKNKDEILALLKALFLPKRLSIIHCPGHQKGHSAEARGNRMADQAARKAAITETPDTSTLLIENSSP

SEQ ID NO: 144 - DNA, 6246 bp, synthetic construct
  misc_feature 1..6246: note = Description of Artificial Sequence: Synthetic polynucleotide
  source 1..6246: mol_type = other DNA
gacaagaagtacagcatcggcctggacatcggcaccaactctgtgggctgggccgtgatcaccgacgagtacaaggtgcccagcaagaaattcaaggtgctgggcaacaccgaccggcacagcatcaagaagaacctgatcggagccctgctgttcgacagcggcgaaacagccgaggccacccggctgaagagaaccgccagaagaagatacaccagacggaagaaccggatctgctatctgcaagagatcttcagcaacgagatggccaaggtggacgacagcttcttccacagactggaagagtccttcctggtggaagaggataagaagcacgagcggcaccccatcttcggcaacatcgtggacgaggtggcctaccacgagaagtaccccaccatctaccacctgagaaagaaactggtggacagcaccgacaaggccgacctgcggctgatctatctggccctggcccacatgatcaagttccggggccacttcctgatcgagggcgacctgaaccccgacaacagcgacgtggacaagctgttcatccagctggtgcagacctacaaccagctgttcgaggaaaaccccatcaacgccagcggcgtggacgccaaggccatcctgtctgccagactgagcaagagcagacggctggaaaatctgatcgcccagctgcccggcgagaagaagaatggcctgttcggaaacctgattgccctgagcctgggcctgacccccaacttcaagagcaacttcgacctggccgaggatgccaaactgcagctgagcaaggacacctacgacgacgacctggacaacctgctggcccagatcggcgaccagtacgccgacctgtttctggccgccaagaacctgtccgacgccatcctgctgagcgacatcctgagagtgaacaccgagatcaccaaggcccccctgagcgcctctatgatcaagagatacgacgagcaccaccaggacctgaccctgctgaaagctctcgtgcggcagcagctgcctgagaagtacaaagagattttcttcgaccagagcaagaacggctacgccggctacattgacggcggagccagccaggaagagttctacaagttcatcaagcccatcctggaaaagatggacggcaccgaggaactgctcgtgaagctgaacagagaggacctgctgcggaagcagcggaccttcgacaacggcagcatcccccaccagatccacctgggagagctgcacgccattctgcggcggcaggaagatttttacccattcctgaaggacaaccgggaaaagatcgagaagatcctgaccttccgcatcccctactacgtgggccctctggccaggggaaacagcagattcgcctggatgaccagaaagagcgaggaaaccatcaccccctggaacttcgaggaagtggtggacaagggcgcttccgcccagagcttcatcgagcggatgaccaacttcgataagaacctgcccaacgagaaggtgctgcccaagcacagcctgctgtacgagtacttcaccgtgtataacgagctgaccaaagtgaaatacgtgaccgagggaatgagaaagcccgccttcctgagcggcgagcagaaaaaggccatcgtggacctgctgttcaagaccaaccggaaagtgaccgtgaagcagctgaaagaggactacttcaagaaaatcgagtgcttcgactccgtggaaatctccggcgtggaagatcggttcaacgcctccctgggcacataccacgatctgctgaaaattatcaaggacaaggacttcctggacaatgaggaaaacgaggacattctggaagatatcgtgctgaccctgacactgtttgaggacagagagatgatcgaggaacggctgaaaacctatgcccacctgttcgacgacaaagtgatgaagcagctgaagcggcggagatacaccggctggggcaggctgagccggaagctgatcaacggcatccgggacaagcagtccggcaagacaatcctggatttcctgaagtccgacggcttcgccaacagaaacttcatgcagctgatccacgacgacagcctgacctttaaagaggacatccagaaagcccaggtgtccggccagggcgatagcctgcacgagcacattgccaatctggccggcagccccgccattaagaagggcatcctgcagacagtgaaggtggtggacgagctcgtgaaagtgatgggccggcacaagcccgagaacatcgtgatcgaaatggccagagagaaccagaccacccagaagggacagaagaacagccgcgagagaatgaagcggatcgaagagggcatcaaagagctgggcagccagatcctgaaagaacaccccgtggaaaacacccagctgcagaacgagaagctgtacctgtactacctgcagaatgggcgggatatgtacgtggaccaggaactggacatcaaccggctgtccgactacgatgtggacgctatcgtgcctcagagctttctgaaggacgactccatcgacaacaaggtgctgaccagaagcgacaagaaccggggcaagagcgacaacgtgccctccgaagaggtcgtgaagaagatgaagaactactggcggcagctgctgaacgccaagctgattacccagagaaagttcgacaatctgaccaaggccgagagaggcggcctgagcgaactggataaggccggcttcatcaagagacagctggtggaaacccggcagatcacaaagcacgtggcacagatcctggactcccggatgaacactaagtacgacgagaatgacaagctgatccgggaagtgaaagtgatcaccctgaagtccaagctggtgtccgatttccggaaggatttccagttttacaaagtgcgcgagatcaacaactaccaccacgcccacgacgcctacctgaacgccgtcgtgggaaccgccctgatcaaaaagtaccctaagctggaaagcgagttcgtgtacggcgactacaaggtgtacgacgtgcggaagatgatcgccaagagcgagcaggaaatcggcaaggctaccgccaagtacttcttctacagcaacatcatgaactttttcaagaccgagattaccctggccaacggcgagatccggaagcggcctctgatcgagacaaacggcgaaaccggggagatcgtgtgggataagggccgggattttgccaccgtgcggaaagtgctgagcatgccccaagtgaatatcgtgaaaaagaccgaggtgcagacaggcggcttcagcaaagagtctatcctgcccaagaggaacagcgataagctgatcgccagaaagaaggactgggaccctaagaagtacggcggcttcgacagccccaccgtggcctattctgtgctggtggtggccaaagtggaaaagggcaagtccaagaaactgaagagtgtgaaagagctgctggggatcaccatcatggaaagaagcagcttcgagaagaatcccatcgactttctggaagccaagggctacaaagaagtgaaaaaggacctgatcatcaagctgcctaagtactccctgttcgagctggaaaacggccggaagagaatgctggcctctgccggcgaactgcagaagggaaacgaactggccctgccctccaaatatgtgaacttcctgtacctggccagccactatgagaagctgaagggctcccccgaggataatgagcagaaacagctgtttgtggaacagcacaagcactacctggacgagatcatcgagcagatcagcgagttctccaagagagtgatcctggccgacgctaatctggacaaagtgctgtccgcctacaacaagcaccgggataagcccatcagagagcaggccgagaatatcatccacctgtttaccctgaccaatctgggagcccctgccgccttcaagtactttgacaccaccatcgaccggaagaggtacaccagcaccaaagaggtgctggacgccaccctgatccaccagagcatcaccggcctgtacgagacacggatcgacctgtctcagctgggaggtgactccggcggcagcgaggccgccgccaaggaagccgctgccaaggaggccgctgccaaggaggccgccgctaaggaagccgccgccaaggaggccgccgctaaaagcggcggatctaccctgaacatcgaggacgagtacaggctgcacgagaccagcaaggagcccgacgtgagcctgggcagcacctggctgagcgatttccctcaggcttgggccgagaccggcggcatgggcctggccgtgcggcaggcccccctgattatccccctgaaggccaccagcacccccgtgagcatcaagcagtacccaatgtcccaggaggccaggctgggcatcaagcctcacatccagaggctgctggaccagggcatcctggtgccatgccagtccccctggaacacccctctgctgcccgtgaagaagcctggcaccaacgactaccggcccgtgcaggacctgagagaagtgaacaagcgggtggaggacatccacccaaccgtgcccaacccttacaacctgctgtccggcctgccccccagccaccagtggtacaccgtgctggacctgaaggacgccttcttctgcctgagactgcaccccacctctcagcccctgttcgccttcgagtggcgcgaccccgagatgggcatcagcggccagctgacctggaccagactgccacagggctttaagaatagcccaaccctgtttaacgaggccctgcacagggacctggccgacttcaggatccagcaccccgacctgattctgctgcagtacgtggacgacctgctgctggccgctaccagcgagctggactgccagcagggcaccagagccctgctgcagaccctgggcaacctgggctacagagccagcgccaagaaggcccagatctgtcagaagcaggtgaagtatctgggctacctgctgaaggaaggccagagatggctgaccgaggccagaaaggagactgtgatgggccagcccacccccaagacccccaggcagctgcgggagttcctgggcaaggccggcttttgcagactgtttatccctggcttcgccgagatggccgccccactgtaccctctgaccaagcctggcaccctgtttaactggggccccgaccagcagaaggcctaccaggagatcaagcaggccctgctgaccgcccccgccctgggcctgcccgacctgaccaagcctttcgagctgttcgtggacgagaagcagggatacgccaaaggcgtgctgacccagaagctgggcccctggcggaggcccgtggcctacctgagcaaaaaactggaccctgtggccgccggctggcccccatgcctgcggatggtggccgccatcgctgtgctgaccaaggacgccggcaagctgaccatgggccagcccctggtgatcctggcccctcacgccgtggaggctctggtgaagcagcctccagacaggtggctgtccaacgccaggatgacccactaccaggccctgctgctggacaccgaccgggtgcagttcggccctgtggtggccctgaaccccgccaccctgctgcctctgccagaggagggcctgcagcacaactgcctggacatcctggccgaggcccacggcaccaggcccgacctgaccgaccagcccctgcctgacgccgaccacacctggtacaccgacggcagctccctgctgcaggagggccagaggaaggccggcgccgccgtgaccaccgagaccgaggtgatctgggccaaagccctgcctgccggcacctccgcccagcgggccgagctgatcgccctgacccaggccctgaagatggctgagggcaagaagctgaacgtgtacaccgattccagatacgccttcgccaccgcccacatccacggcgagatctacagaagaaggggctggctgacctccgagggcaaggagatcaagaacaaggacgagattctggccctgctgaaggccctgttcctgcctaagagactgagcatcatccactgtcccggccaccagaagggccacagcgccgaggccagaggcaatagaatggccgaccaggccgccagaaaggccgccatcaccgagacccccgacaccagcaccctgctgatcgagaacagcagcccc

SEQ ID NO: 145 - RNA, 6246 nt, synthetic construct
  misc_feature 1..6246: note = Description of Artificial Sequence: Synthetic polynucleotide
  source 1..6246: mol_type = other RNA
gacaagaagtacagcatcggcctggacatcggcaccaactctgtgggctgggccgtgatcaccgacgagtacaaggtgcccagcaagaaattcaaggtgctgggcaacaccgaccggcacagcatcaagaagaacctgatcggagccctgctgttcgacagcggcgaaacagccgaggccacccggctgaagagaaccgccagaagaagatacaccagacggaagaaccggatctgctatctgcaagagatcttcagcaacgagatggccaaggtggacgacagcttcttccacagactggaagagtccttcctggtggaagaggataagaagcacgagcggcaccccatcttcggcaacatcgtggacgaggtggcctaccacgagaagtaccccaccatctaccacctgagaaagaaactggtggacagcaccgacaaggccgacctgcggctgatctatctggccctggcccacatgatcaagttccggggccacttcctgatcgagggcgacctgaaccccgacaacagcgacgtggacaagctgttcatccagctggtgcagacctacaaccagctgttcgaggaaaaccccatcaacgccagcggcgtggacgccaaggccatcctgtctgccagactgagcaagagcagacggctggaaaatctgatcgcccagctgcccggcgagaagaagaatggcctgttcggaaacctgattgccctgagcctgggcctgacccccaacttcaagagcaacttcgacctggccgaggatgccaaactgcagctgagcaaggacacctacgacgacgacctggacaacctgctggcccagatcggcgaccagtacgccgacctgtttctggccgccaagaacctgtccgacgccatcctgctgagcgacatcctgagagtgaacaccgagatcaccaaggcccccctgagcgcctctatgatcaagagatacgacgagcaccaccaggacctgaccctgctgaaagctctcgtgcggcagcagctgcctgagaagtacaaagagattttcttcgaccagagcaagaacggctacgccggctacattgacggcggagccagccaggaagagttctacaagttcatcaagcccatcctggaaaagatggacggcaccgaggaactgctcgtgaagctgaacagagaggacctgctgcggaagcagcggaccttcgacaacggcagcatcccccaccagatccacctgggagagctgcacgccattctgcggcggcaggaagatttttacccattcctgaaggacaaccgggaaaagatcgagaagatcctgaccttccgcatcccctactacgtgggccctctggccaggggaaacagcagattcgcctggatgaccagaaagagcgaggaaaccatcaccccctggaacttcgaggaagtggtggacaagggcgcttccgcccagagcttcatcgagcggatgaccaacttcgataagaacctgcccaacgagaaggtgctgcccaagcacagcctgctgtacgagtacttcaccgtgtataacgagctgaccaaagtgaaatacgtgaccgagggaatgagaaagcccgccttcctgagcggcgagcagaaaaaggccatcgtggacctgctgttcaagaccaaccggaaagtgaccgtgaagcagctgaaagaggactacttcaagaaaatcgagtgcttcgactccgtggaaatctccggcgtggaagatcggttcaacgcctccctgggcacataccacgatctgctgaaaattatcaaggacaaggacttcctggacaatgaggaaaacgaggacattctggaagatatcgtgctgaccctgacactgtttgaggacagagagatgatcgaggaacggctgaaaacctatgcccacctgttcgacgacaaagtgatgaagcagctgaagcggcggagatacaccggctggggcaggctgagccggaagctgatcaacggcatccgggacaagcagtccggcaagacaatcctggatttcctgaagtccgacggcttcgccaacagaaacttcatgcagctgatccacgacgacagcctgacctttaaagaggacatccagaaagcccaggtgtccggccagggcgatagcctgcacgagcacattgccaatctggccggcagccccgccattaagaagggcatcctgcagacagtgaaggtggtggacgagctcgtgaaagtgatgggccggcacaagcccgagaacatcgtgatcgaaatggccagagagaaccagaccacccagaagggacagaagaacagccgcgagagaatgaagcggatcgaagagggcatcaaagagctgggcagccagatcctgaaagaacaccccgtggaaaacacccagctgcagaacgagaagctgtacctgtactacctgcagaatgggcgggatatgtacgtggaccaggaactggacatcaaccggctgtccgactacgatgtggacgctatcgtgcctcagagctttctgaaggacgactccatcgacaacaaggtgctgaccagaagcgacaagaaccggggcaagagcgacaacgtgccctccgaagaggtcgtgaagaagatgaagaactactggcggcagctgctgaacgccaagctgattacccagagaaagttcgacaatctgaccaaggccgagagaggcggcctgagcgaactggataaggccggcttcatcaagagacagctggtggaaacccggcagatcacaaagcacgtggcacagatcctggactcccggatgaacactaagtacgacgagaatgacaagctgatccgggaagtgaaagtgatcaccctgaagtccaagctggtgtccgatttccggaaggatttccagttttacaaagtgcgcgagatcaacaactaccaccacgcccacgacgcctacctgaacgccgtcgtgggaaccgccctgatcaaaaagtaccctaagctggaaagcgagttcgtgtacggcgactacaaggtgtacgacgtgcggaagatgatcgccaagagcgagcaggaaatcggcaaggctaccgccaagtacttcttctacagcaacatcatgaactttttcaagaccgagattaccctggccaacggcgagatccggaagcggcctctgatcgagacaaacggcgaaaccggggagatcgtgtgggataagggccgggattttgccaccgtgcggaaagtgctgagcatgccccaagtgaatatcgtgaaaaagaccgaggtgcagacaggcggcttcagcaaagagtctatcctgcccaagaggaacagcgataagctgatcgccagaaagaaggactgggaccctaagaagtacggcggcttcgacagccccaccgtggcctattctgtgctggtggtggccaaagtggaaaagggcaagtccaagaaactgaagagtgtgaaagagctgctggggatcaccatcatggaaagaagcagcttcgagaagaatcccatcgactttctggaagccaagggctacaaagaagtgaaaaaggacctgatcatcaagctgcctaagtactccctgttcgagctggaaaacggccggaagagaatgctggcctctgccggcgaactgcagaagggaaacgaactggccctgccctccaaatatgtgaacttcctgtacctggccagccactatgagaagctgaagggctcccccgaggataatgagcagaaacagctgtttgtggaacagcacaagcactacctggacgagatcatcgagcagatcagcgagttctccaagagagtgatcctggccgacgctaatctggacaaagtgctgtccgcctacaacaagcaccgggataagcccatcagagagcaggccgagaatatcatccacctgtttaccctgaccaatctgggagcccctgccgccttcaagtactttgacaccaccatcgaccggaagaggtacaccagcaccaaagaggtgctggacgccaccctgatccaccagagcatcaccggcctgtacgagacacggatcgacctgtctcagctgggaggtgactccggcggcagcgaggccgccgccaaggaagccgctgccaaggaggccgctgccaaggaggccgccgctaaggaagccgccgccaaggaggccgccgctaaaagcggcggatctaccctgaacatcgaggacgagtacaggctgcacgagaccagcaaggagcccgacgtgagcctgggcagcacctggctgagcgatttccctcaggcttgggccgagaccggcggcatgggcctggccgtgcggcaggcccccctgattatccccctgaaggccaccagcacccccgtgagcatcaagcagtacccaatgtcccaggaggccaggctgggcatcaagcctcacatccagaggctgctggaccagggcatcctggtgccatgccagtccccctggaacacccctctgctgcccgtgaagaagcctggcaccaacgactaccggcccgtgcaggacctgagagaagtgaacaagcgggtggaggacatccacccaaccgtgcccaacccttacaacctgctgtccggcctgccccccagccaccagtggtacaccgtgctggacctgaaggacgccttcttctgcctgagactgcaccccacctctcagcccctgttcgccttcgagtggcgcgaccccgagatgggcatcagcggccagctgacctggaccagactgccacagggctttaagaatagcccaaccctgtttaacgaggccctgcacagggacctggccgacttcaggatccagcaccccgacctgattctgctgcagtacgtggacgacctgctgctggccgctaccagcgagctggactgccagcagggcaccagagccctgctgcagaccctgggcaacctgggctacagagccagcgccaagaaggcccagatctgtcagaagcaggtgaagtatctgggctacctgctgaaggaaggccagagatggctgaccgaggccagaaaggagactgtgatgggccagcccacccccaagacccccaggcagctgcgggagttcctgggcaaggccggcttttgcagactgtttatccctggcttcgccgagatggccgccccactgtaccctctgaccaagcctggcaccctgtttaactggggccccgaccagcagaaggcctaccaggagatcaagcaggccctgctgaccgcccccgccctgggcctgcccgacctgaccaagcctttcgagctgttcgtggacgagaagcagggatacgccaaaggcgtgctgacccagaagctgggcccctggcggaggcccgtggcctacctgagcaaaaaactggaccctgtggccgccggctggcccccatgcctgcggatggtggccgccatcgctgtgctgaccaaggacgccggcaagctgaccatgggccagcccctggtgatcctggcccctcacgccgtggaggctctggtgaagcagcctccagacaggtggctgtccaacgccaggatgacccactaccaggccctgctgctggacaccgaccgggtgcagttcggccctgtggtggccctgaaccccgccaccctgctgcctctgccagaggagggcctgcagcacaactgcctggacatcctggccgaggcccacggcaccaggcccgacctgaccgaccagcccctgcctgacgccgaccacacctggtacaccgacggcagctccctgctgcaggagggccagaggaaggccggcgccgccgtgaccaccgagaccgaggtgatctgggccaaagccctgcctgccggcacctccgcccagcgggccgagctgatcgccctgacccaggccctgaagatggctgagggcaagaagctgaacgtgtacaccgattccagatacgccttcgccaccgcccacatccacggcgagatctacagaagaaggggctggctgacctccgagggcaaggagatcaagaacaaggacgagattctggccctgctgaaggccctgttcctgcctaagagactgagcatcatccactgtcccggccaccagaagggccacagcgccgaggccagaggcaatagaatggccgaccaggccgccagaaaggccgccatcaccgagacccccgacaccagcaccctgctgatcgagaacagcagcccc

SEQ ID NO: 146 - protein, 1909 aa, synthetic construct
  REGION 1..1909: note = Description of Artificial Sequence: Synthetic polypeptide
DKKYSIGLDIGTNSVGWAVITDEYKVPSKKFKVLGNTDRHSIKKNLIGALLFDSGETAEATRLKRTARRRYTRRKNRICYLQEIFSNEMAKVDDSFFHRLEESFLVEEDKKHERHPIFGNIVDEVAYHEKYPTIYHLRKKLVDSTDKADLRLIYLALAHMIKFRGHFLIEGDLNPDNSDVDKLFIQLVQTYNQLFEENPINASGVDAKAILSARLSKSRRLENLIAQLPGEKKNGLFGNLIALSLGLTPNFKSNFDLAEDAKLQLSKDTYDDDLDNLLAQIGDQYADLFLAAKNLSDAILLSDILRVNTEITKAPLSASMIKRYDEHHQDLTLLKALVRQQLPEKYKEIFFDQSKNGYAGYIDGGASQEEFYKFIKPILEKMDGTEELLVKLNREDLLRKQRTFDNGSIPHQIHLGELHAILRRQEDFYPFLKDNREKIEKILTFRIPYYVGPLARGNSRFAWMTRKSEETITPWNFEEVVDKGASAQSFIERMTNFDKNLPNEKVLPKHSLLYEYFTVYNELTKVKYVTEGMRKPAFLSGEQKKAIVDLLFKTNRKVTVKQLKEDYFKKIECFDSVEISGVEDRFNASLGTYHDLLKIIKDKDFLDNEENEDILEDIVLTLTLFEDREMIEERLKTYAHLFDDKVMKQLKRRRYTGWGRLSRKLINGIRDKQSGKTILDFLKSDGFANRNFMQLIHDDSLTFKEDIQKAQVSGQGDSLHEHIANLAGSPAIKKGILQTVKVVDELVKVMGRHKPENIVIEMARENQTTQKGQKNSRERMKRIEEGIKELGSQILKEHPVENTQLQNEKLYLYYLQNGRDMYVDQELDINRLSDYDVDAIVPQSFLKDDSIDNKVLTRSDKNRGKSDNVPSEEVVKKMKNYWRQLLNAKLITQRKFDNLTKAERGGLSELDKAGFIKRQLVETRQITKHVAQILDSRMNTKYDENDKLIREVKVITLKSKLVSDFRKDFQFYKVREINNYHHAHDAYLNAVVGTALIKKYPKLESEFVYGDYKVYDVRKMIAKSEQEIGKATAKYFFYSNIMNFFKTEITLANGEIRKRPLIETNGETGEIVWDKGRDFATVRKVLSMPQVNIVKKTEVQTGGFSKESILPKRNSDKLIARKKDWDPKKYGGFDSPTVAYSVLVVAKVEKGKSKKLKSVKELLGITIMERSSFEKNPIDFLEAKGYKEVKKDLIIKLPKYSLFELENGRKRMLASAGELQKGNELALPSKYVNFLYLASHYEKLKGSPEDNEQKQLFVEQHKHYLDEIIEQISEFSKRVILADANLDKVLSAYNKHRDKPIREQAENIIHLFTLTNLGAPAAFKYFDTTIDRKRYTSTKEVLDATLIHQSITGLYETRIDLSQLGGDSGGSEAAAKEAAAKEAAAKEAAAKEAAAKEAAAKSGGSTLNIEDEYRLHETSKEPDVSLGSTWLSDFPQAWAETGGMGLAVRQAPLIIPLKATSTPVSIKQYPMSQEARLGIKPHIQRLLDQGILVPCQSPWNTPLLPVKKPGTNDYRPVQDLREVNKRVEDIHPTVPNPYNLLSGLPPSHQWYTVLDLKDAFFCLRLHPTSQPLFAFEWRDPEMGISGQLTWTRLPQGFKNSPTLFNEALHRDLADFRIQHPDLILLQYVDDLLLAATSELDCQQGTRALLQTLGNLGYRASAKKAQICQKQVKYLGYLLKEGQRWLTEARKETVMGQPTPKTPRQLREFLGKAGFCRLFIPGFAEMAAPLYPLTKPGTLFNWGPDQQKAYQEIKQALLTAPALGLPDLTKPFELFVDEKQGYAKGVLTQKLGPWRRPVAYLSKKLDPVAAGWPPCLRMVAAIAVLTKDAGKLTMGQPLVILAPHAVEALVKQPPDRWLSNARMTHYQALLLDTDRVQFGPVVALNPATLLPLPEEGLQHNCLDILAEAHG

SEQ ID NO: 147 - DNA, 5727 bp, synthetic construct
  misc_feature 1..5727: note = Description of Artificial Sequence: Synthetic polynucleotide
  source 1..5727: mol_type = other DNA
gacaagaagtacagcatcggcctggacatcggcaccaactctgtgggctgggccgtgatcaccgacgagtacaaggtgcccagcaagaaattcaaggtgctgggcaacaccgaccggcacagcatcaagaagaacctgatcggagccctgctgttcgacagcggcgaaacagccgaggccacccggctgaagagaaccgccagaagaagatacaccagacggaagaaccggatctgctatctgcaagagatcttcagcaacgagatggccaaggtggacgacagcttcttccacagactggaagagtccttcctggtggaagaggataagaagcacgagcggcaccccatcttcggcaacatcgtggacgaggtggcctaccacgagaagtaccccaccatctaccacctgagaaagaaactggtggacagcaccgacaaggccgacctgcggctgatctatctggccctggcccacatgatcaagttccggggccacttcctgatcgagggcgacctgaaccccgacaacagcgacgtggacaagctgttcatccagctggtgcagacctacaaccagctgttcgaggaaaaccccatcaacgccagcggcgtggacgccaaggccatcctgtctgccagactgagcaagagcagacggctggaaaatctgatcgcccagctgcccggcgagaagaagaatggcctgttcggaaacctgattgccctgagcctgggcctgacccccaacttcaagagcaacttcgacctggccgaggatgccaaactgcagctgagcaaggacacctacgacgacgacctggacaacctgctggcccagatcggcgaccagtacgccgacctgtttctggccgccaagaacctgtccgacgccatcctgctgagcgacatcctgagagtgaacaccgagatcaccaaggcccccctgagcgcctctatgatcaagagatacgacgagcaccaccaggacctgaccctgctgaaagctctcgtgcggcagcagctgcctgagaagtacaaagagattttcttcgaccagagcaagaacggctacgccggctacattgacggcggagccagccaggaagagttctacaagttcatcaagcccatcctggaaaagatggacggcaccgaggaactgctcgtgaagctgaacagagaggacctgctgcggaagcagcggaccttcgacaacggcagcatcccccaccagatccacctgggagagctgcacgccattctgcggcggcaggaagatttttacccattcctgaaggacaaccgggaaaagatcgagaagatcctgaccttccgcatcccctactacgtgggccctctggccaggggaaacagcagattcgcctggatgaccagaaagagcgaggaaaccatcaccccctggaacttcgaggaagtggtggacaagggcgcttccgcccagagcttcatcgagcggatgaccaacttcgataagaacctgcccaacgagaaggtgctgcccaagcacagcctgctgtacgagtacttcaccgtgtataacgagctgaccaaagtgaaatacgtgaccgagggaatgagaaagcccgccttcctgagcggcgagcagaaaaaggccatcgtggacctgctgttcaagaccaaccggaaagtgaccgtgaagcagctgaaagaggactacttcaagaaaatcgagtgcttcgactccgtggaaatctccggcgtggaagatcggttcaacgcctccctgggcacataccacgatctgctgaaaattatcaaggacaaggacttcctggacaatgaggaaaacgaggacattctggaagatatcgtgctgaccctgacactgtttgaggacagagagatgatcgaggaacggctgaaaacctatgcccacctgttcgacgacaaagtgatgaagcagctgaagcggcggagatacaccggctggggcaggctgagccggaagctgatcaacggcatccgggacaagcagtccggcaagacaatcctggatttcctgaagtccgacggcttcgccaacagaaacttcatgcagctgatccacgacgacagcctgacctttaaagaggacatccagaaagcccaggtgtccggccagggcgatagcctgcacgagcacattgccaatctggccggcagccccgccattaagaagggcatcctgcagacagtgaaggtggtggacgagctcgtgaaagtgatgggccggcacaagcccgagaacatcgtgatcgaaatggccagagagaaccagaccacccagaagggacagaagaacagccgcgagagaatgaagcggatcgaagagggcatcaaagagctgggcagccagatcctgaaagaacaccccgtggaaaacacccagctgcagaacgagaagctgtacctgtactacctgcagaatgggcgggatatgtacgtggaccaggaactggacatcaaccggctgtccgactacgatgtggacgctatcgtgcctcagagctttctgaaggacgactccatcgacaacaaggtgctgaccagaagcgacaagaaccggggcaagagcgacaacgtgccctccgaagaggtcgtgaagaagatgaagaactactggcggcagctgctgaacgccaagctgattacccagagaaagttcgacaatctgaccaaggccgagagaggcggcctgagcgaactggataaggccggcttcatcaagagacagctggtggaaacccggcagatcacaaagcacgtggcacagatcctggactcccggatgaacactaagtacgacgagaatgacaagctgatccgggaagtgaaagtgatcaccctgaagtccaagctggtgtccgatttccggaaggatttccagttttacaaagtgcgcgagatcaacaactaccaccacgcccacgacgcctacctgaacgccgtcgtgggaaccgccctgatcaaaaagtaccctaagctggaaagcgagttcgtgtacggcgactacaaggtgtacgacgtgcggaagatgatcgccaagagcgagcaggaaatcggcaaggctaccgccaagtacttcttctacagcaacatcatgaactttttcaagaccgagattaccctggccaacggcgagatccggaagcggcctctgatcgagacaaacggcgaaaccggggagatcgtgtgggataagggccgggattttgccaccgtgcggaaagtgctgagcatgccccaagtgaatatcgtgaaaaagaccgaggtgcagacaggcggcttcagcaaagagtctatcctgcccaagaggaacagcgataagctgatcgccagaaagaaggactgggaccctaagaagtacggcggcttcgacagccccaccgtggcctattctgtgctggtggtggccaaagtggaaaagggcaagtccaagaaactgaagagtgtgaaagagctgctggggatcaccatcatggaaagaagcagcttcgagaagaatcccatcgactttctggaagccaagggctacaaagaagtgaaaaaggacctgatcatcaagctgcctaagtactccctgttcgagctggaaaacggccggaagagaatgctggcctctgccggcgaactgcagaagggaaacgaactggccctgccctccaaatatgtgaacttcctgtacctggccagccactatgagaagctgaagggctcccccgaggataatgagcagaaacagctgtttgtggaacagcacaagcactacctggacgagatcatcgagcagatcagcgagttctccaagagagtgatcctggccgacgctaatctggacaaagtgctgtccgcctacaacaagcaccgggataagcccatcagagagcaggccgagaatatcatccacctgtttaccctgaccaatctgggagcccctgccgccttcaagtactttgacaccaccatcgaccggaagaggtacaccagcaccaaagaggtgctggacgccaccctgatccaccagagcatcaccggcctgtacgagacacggatcgacctgtctcagctgggaggtgactccggcggcagcgaggccgccgccaaggaagccgctgccaaggaggccgctgccaaggaggccgccgctaaggaagccgccgccaaggaggccgccgctaaaagcggcggatctaccctgaacatcgaggacgagtacaggctgcacgagaccagcaaggagcccgacgtgagcctgggcagcacctggctgagcgatttccctcaggcttgggccgagaccggcggcatgggcctggccgtgcggcaggcccccctgattatccccctgaaggccaccagcacccccgtgagcatcaagcagtacccaatgtcccaggaggccaggctgggcatcaagcctcacatccagaggctgctggaccagggcatcctggtgccatgccagtccccctggaacacccctctgctgcccgtgaagaagcctggcaccaacgactaccggcccgtgcaggacctgagagaagtgaacaagcgggtggaggacatccacccaaccgtgcccaacccttacaacctgctgtccggcctgccccccagccaccagtggtacaccgtgctggacctgaaggacgccttcttctgcctgagactgcaccccacctctcagcccctgttcgccttcgagtggcgcgaccccgagatgggcatcagcggccagctgacctggaccagactgccacagggctttaagaatagcccaaccctgtttaacgaggccctgcacagggacctggccgacttcaggatccagcaccccgacctgattctgctgcagtacgtggacgacctgctgctggccgctaccagcgagctggactgccagcagggcaccagagccctgctgcagaccctgggcaacctgggctacagagccagcgccaagaaggcccagatctgtcagaagcaggtgaagtatctgggctacctgctgaaggaaggccagagatggctgaccgaggccagaaaggagactgtgatgggccagcccacccccaagacccccaggcagctgcgggagttcctgggcaaggccggcttttgcagactgtttatccctggcttcgccgagatggccgccccactgtaccctctgaccaagcctggcaccctgtttaactggggccccgaccagcagaaggcctaccaggagatcaagcaggccctgctgaccgcccccgccctgggcctgcccgacctgaccaagcctttcgagctgttcgtggacgagaagcagggatacgccaaaggcgtgctgacccagaagctgggcccctggcggaggcccgtggcctacctgagcaaaaaactggaccctgtggccgccggctggcccccatgcctgcggatggtggccgccatcgctgtgctgaccaaggacgccggcaagctgaccatgggccagcccctggtgatcctggcccctcacgccgtggaggctctggtgaagcagcctccagacaggtggctgtccaacgccaggatgacccactaccaggccctgctgctggacaccgaccgggtgcagttcggccctgtggtggccctgaaccccgccaccctgctgcctctgccagaggagggcctgcagcacaactgcctggacatcctggccgaggcccacggc

SEQ ID NO: 148 - RNA, 5727 nt, synthetic construct
  misc_feature 1..5727: note = Description of Artificial Sequence: Synthetic polynucleotide
  source 1..5727: mol_type = other RNA
gacaagaagtacagcatcggcctggacatcggcaccaactctgtgggctgggccgtgatcaccgacgagtacaaggtgcccagcaagaaattcaaggtgctgggcaacaccgaccggcacagcatcaagaagaacctgatcggagccctgctgttcgacagcggcgaaacagccgaggccacccggctgaagagaaccgccagaagaagatacaccagacggaagaaccggatctgctatctgcaagagatcttcagcaacgagatggccaaggtggacgacagcttcttccacagactggaagagtccttcctggtggaagaggataagaagcacgagcggcaccccatcttcggcaacatcgtggacgaggtggcctaccacgagaagtaccccaccatctaccacctgagaaagaaactggtggacagcaccgacaaggccgacctgcggctgatctatctggccctggcccacatgatcaagttccggggccacttcctgatcgagggcgacctgaaccccgacaacagcgacgtggacaagctgttcatccagctggtgcagacctacaaccagctgttcgaggaaaaccccatcaacgccagcggcgtggacgccaaggccatcctgtctgccagactgagcaagagcagacggctggaaaatctgatcgcccagctgcccggcgagaagaagaatggcctgttcggaaacctgattgccctgagcctgggcctgacccccaacttcaagagcaacttcgacctggccgaggatgccaaactgcagctgagcaaggacacctacgacgacgacctggacaacctgctggcccagatcggcgaccagtacgccgacctgtttctggccgccaagaacctgtccgacgccatcctgctgagcgacatcctgagagtgaacaccgagatcaccaaggcccccctgagcgcctctatgatcaagagatacgacgagcaccaccaggacctgaccctgctgaaagctctcgtgcggcagcagctgcctgagaagtacaaagagattttcttcgaccagagcaagaacggctacgccggctacattgacggcggagccagccaggaagagttctacaagttcatcaagcccatcctggaaaagatggacggcaccgaggaactgctcgtgaagctgaacagagaggacctgctgcggaagcagcggaccttcgacaacggcagcatcccccaccagatccacctgggagagctgcacgccattctgcggcggcaggaagatttttacccattcctgaaggacaaccgggaaaagatcgagaagatcctgaccttccgcatcccctactacgtgggccctctggccaggggaaacagcagattcgcctggatgaccagaaagagcgaggaaaccatcaccccctggaacttcgaggaagtggtggacaagggcgcttccgcccagagcttcatcgagcggatgaccaacttcgataagaacctgcccaacgagaaggtgctgcccaagcacagcctgctgtacgagtacttcaccgtgtataacgagctgaccaaagtgaaatacgtgaccgagggaatgagaaagcccgccttcctgagcggcgagcagaaaaaggccatcgtggacctgctgttcaagaccaaccggaaagtgaccgtgaagcagctgaaagaggactacttcaagaaaatcgagtgcttcgactccgtggaaatctccggcgtggaagatcggttcaacgcctccctgggcacataccacgatctgctgaaaattatcaaggacaaggacttcctggacaatgaggaaaacgaggacattctggaagatatcgtgctgaccctgacactgtttgaggacagagagatgatcgaggaacggctgaaaacctatgcccacctgttcgacgacaaagtgatgaagcagctgaagcggcggagatacaccggctggggcaggctgagccggaagctgatcaacggcatccgggacaagcagtccggcaagacaatcctggatttcctgaagtccgacggcttcgccaacagaaacttcatgcagctgatccacgacgacagcctgacctttaaagaggacatccagaaagcccaggtgtccggccagggcgatagcctgcacgagcacattgccaatctggccggcagccccgccattaagaagggcatcctgcagacagtgaaggtggtggacgagctcgtgaaagtgatgggccggcacaagcccgagaacatcgtgatcgaaatggccagagagaaccagaccacccagaagggacagaagaacagccgcgagagaatgaagcggatcgaagagggcatcaaagagctgggcagccagatcctgaaagaacaccccgtggaaaacacccagctgcagaacgagaagctgtacctgtactacctgcagaatgggcgggatatgtacgtggaccaggaactggacatcaaccggctgtccgactacgatgtggacgctatcgtgcctcagagctttctgaaggacgactccatcgacaacaaggtgctgaccagaagcgacaagaaccggggcaagagcgacaacgtgccctccgaagaggtcgtgaagaagatgaagaactactggcggcagctgctgaacgccaagctgattacccagagaaagttcgacaatctgaccaaggccgagagaggcggcctgagcgaactggataaggccggcttcatcaagagacagctggtggaaacccggcagatcacaaagcacgtggcacagatcctggactcccggatgaacactaagtacgacgagaatgacaagctgatccgggaagtgaaagtgatcaccctgaagtccaagctggtgtccgatttccggaaggatttccagttttacaaagtgcgcgagatcaacaactaccaccacgcccacgacgcctacctgaacgccgtcgtgggaaccgccctgatcaaaaagtaccctaagctggaaagcgagttcgtgtacggcgactacaaggtgtacgacgtgcggaagatgatcgccaagagcgagcaggaaatcggcaaggctaccgccaagtacttcttctacagcaacatcatgaactttttcaagaccgagattaccctggccaacggcgagatccggaagcggcctctgatcgagacaaacggcgaaaccggggagatcgtgtgggataagggccgggattttgccaccgtgcggaaagtgctgagcatgccccaagtgaatatcgtgaaaaagaccgaggtgcagacaggcggcttcagcaaagagtctatcctgcccaagaggaacagcgataagctgatcgccagaaagaaggactgggaccctaagaagtacggcggcttcgacagccccaccgtggcctattctgtgctggtggtggccaaagtggaaaagggcaagtccaagaaactgaagagtgtgaaagagctgctggggatcaccatcatggaaagaagcagcttcgagaagaatcccatcgactttctggaagccaagggctacaaagaagtgaaaaaggacctgatcatcaagctgcctaagtactccctgttcgagctggaaaacggccggaagagaatgctggcctctgccggcgaactgcagaagggaaacgaactggccctgccctccaaatatgtgaacttcctgtacctggccagccactatgagaagctgaagggctcccccgaggataatgagcagaaacagctgtttgtggaacagcacaagcactacctggacgagatcatcgagcagatcagcgagttctccaagagagtgatcctggccgacgctaatctggacaaagtgctgtccgcctacaacaagcaccgggataagcccatcagagagcaggccgagaatatcatccacctgtttaccctgaccaatctgggagcccctgccgccttcaagtactttgacaccaccatcgaccggaagaggtacaccagcaccaaagaggtgctggacgccaccctgatccaccagagcatcaccggcctgtacgagacacggatcgacctgtctcagctgggaggtgactccggcggcagcgaggccgccgccaaggaagccgctgccaaggaggccgctgccaaggaggccgccgctaaggaagccgccgccaaggaggccgccgctaaaagcggcggatctaccctgaacatcgaggacgagtacaggctgcacgagaccagcaaggagcccgacgtgagcctgggcagcacctggctgagcgatttccctcaggcttgggccgagaccggcggcatgggcctggccgtgcggcaggcccccctgattatccccctgaaggccaccagcacccccgtgagcatcaagcagtacccaatgtcccaggaggccaggctgggcatcaagcctcacatccagaggctgctggaccagggcatcctggtgccatgccagtccccctggaacacccctctgctgcccgtgaagaagcctggcaccaacgactaccggcccgtgcaggacctgagagaagtgaacaagcgggtggaggacatccacccaaccgtgcccaacccttacaacctgctgtccggcctgccccccagccaccagtggtacaccgtgctggacctgaaggacgccttcttctgcctgagactgcaccccacctctcagcccctgttcgccttcgagtggcgcgaccccgagatgggcatcagcggccagctgacctggaccagactgccacagggctttaagaatagcccaaccctgtttaacgaggccctgcacagggacctggccgacttcaggatccagcaccccgacctgattctgctgcagtacgtggacgacctgctgctggccgctaccagcgagctggactgccagcagggcaccagagccctgctgcagaccctgggcaacctgggctacagagccagcgccaagaaggcccagatctgtcagaagcaggtgaagtatctgggctacctgctgaaggaaggccagagatggctgaccgaggccagaaaggagactgtgatgggccagcccacccccaagacccccaggcagctgcgggagttcctgggcaaggccggcttttgcagactgtttatccctggcttcgccgagatggccgccccactgtaccctctgaccaagcctggcaccctgtttaactggggccccgaccagcagaaggcctaccaggagatcaagcaggccctgctgaccgcccccgccctgggcctgcccgacctgaccaagcctttcgagctgttcgtggacgagaagcagggatacgccaaaggcgtgctgacccagaagctgggcccctggcggaggcccgtggcctacctgagcaaaaaactggaccctgtggccgccggctggcccccatgcctgcggatggtggccgccatcgctgtgctgaccaaggacgccggcaagctgaccatgggccagcccctggtgatcctggcccctcacgccgtggaggctctggtgaagcagcctccagacaggtggctgtccaacgccaggatgacccactaccaggccctgctgctggacaccgaccgggtgcagttcggccctgtggtggccctgaaccccgccaccctgctgcctctgccagaggagggcctgcagcacaactgcctggacatcctggccgaggcccacggc

SEQ ID NO: 149 - protein, 2063 aa, synthetic construct
  REGION 1..2063: note = Description of Artificial Sequence: Synthetic polypeptide
DKKYSIGLDIGTNSVGWAVITDEYKVPSKKFKVLGNTDRHSIKKNLIGALLFDSGETAEATRLKRTARRRYTRRKNRICYLQEIFSNEMAKVDDSFFHRLEESFLVEEDKKHERHPIFGNIVDEVAYHEKYPTIYHLRKKLVDSTDKADLRLIYLALAHMIKFRGHFLIEGDLNPDNSDVDKLFIQLVQTYNQLFEENPINASGVDAKAILSARLSKSRRLENLIAQLPGEKKNGLFGNLIALSLGLTPNFKSNFDLAEDAKLQLSKDTYDDDLDNLLAQIGDQYADLFLAAKNLSDAILLSDILRVNTEITKAPLSASMIKRYDEHHQDLTLLKALVRQQLPEKYKEIFFDQSKNGYAGYIDGGASQEEFYKFIKPILEKMDGTEELLVKLNREDLLRKQRTFDNGSIPHQIHLGELHAILRRQEDFYPFLKDNREKIEKILTFRIPYYVGPLARGNSRFAWMTRKSEETITPWNFEEVVDKGASAQSFIERMTNFDKNLPNEKVLPKHSLLYEYFTVYNELTKVKYVTEGMRKPAFLSGEQKKAIVDLLFKTNRKVTVKQLKEDYFKKIECFDSVEISGVEDRFNASLGTYHDLLKIIKDKDFLDNEENEDILEDIVLTLTLFEDREMIEERLKTYAHLFDDKVMKQLKRRRYTGWGRLSRKLINGIRDKQSGKTILDFLKSDGFANRNFMQLIHDDSLTFKEDIQKAQVSGQGDSLHEHIANLAGSPAIKKGILQTVKVVDELVKVMGRHKPENIVIEMARENQTTQKGQKNSRERMKRIEEGIKELGSQILKEHPVENTQLQNEKLYLYYLQNGRDMYVDQELDINRLSDYDVDAIVPQSFLKDDSIDNKVLTRSDKNRGKSDNVPSEEVVKKMKNYWRQLLNAKLITQRKFDNLTKAERGGLSELDKAGFIKRQLVETRQITKHVAQILDSRMNTKYDENDKLIREVKVITLKSKLVSDFRKDFQFYKVREINNYHHAHDAYLNAVVGTALIKKYPKLESEFVYGDYKVYDVRKMIAKSEQEIGKATAKYFFYSNIMNFFKTEITLANGEIRKRPLIETNGETGEIVWDKGRDFATVRKVLSMPQVNIVKKTEVQTGGFSKESILPKRNSDKLIARKKDWDPKKYGGFDSPTVAYSVLVVAKVEKGKSKKLKSVKELLGITIMERSSFEKNPIDFLEAKGYKEVKKDLIIKLPKYSLFELENGRKRMLASAGELQKGNELALPSKYVNFLYLASHYEKLKGSPEDNEQKQLFVEQHKHYLDEIIEQISEFSKRVILADANLDKVLSAYNKHRDKPIREQAENIIHLFTLTNLGAPAAFKYFDTTIDRKRYTSTKEVLDATLIHQSITGLYETRIDLSQLGGDSGGSPAPAPAPAPAPSGGSTLNIEDEYRLHETSKEPDVSLGSTWLSDFPQAWAETGGMGLAVRQAPLIIPLKATSTPVSIKQYPMSQEARLGIKPHIQRLLDQGILVPCQSPWNTPLLPVKKPGTNDYRPVQDLREVNKRVEDIHPTVPNPYNLLSGLPPSHQWYTVLDLKDAFFCLRLHPTSQPLFAFEWRDPEMGISGQLTWTRLPQGFKNSPTLFNEALHRDLADFRIQHPDLILLQYVDDLLLAATSELDCQQGTRALLQTLGNLGYRASAKKAQICQKQVKYLGYLLKEGQRWLTEARKETVMGQPTPKTPRQLREFLGKAGFCRLFIPGFAEMAAPLYPLTKPGTLFNWGPDQQKAYQEIKQALLTAPALGLPDLTKPFELFVDEKQGYAKGVLTQKLGPWRRPVAYLSKKLDPVAAGWPPCLRMVAAIAVLTKDAGKLTMGQPLVILAPHAVEALVKQPPDRWLSNARMTHYQALLLDTDRVQFGPVVALNPATLLPLPEEGLQHNCLDILAEAHGTRPDLTDQPLPDADHTWYTDGSSLLQEGQRKAGAAVTTETEVIWAKALPAGTSAQRAELIALTQALKMAEGKKLNVYTDSRYAFATAHIHGEIYRRRGWLTSEGKEIKNKDEILALLKALFLPKRLSIIHCPGHQKGHSAEARGNRMADQAARKAAITETPDTSTLLIENSSP

SEQ ID NO: 150 - DNA, 6189 bp, synthetic construct
  misc_feature 1..6189: note = Description of Artificial Sequence: Synthetic polynucleotide
  source 1..6189: mol_type = other DNA
gacaagaagtacagcatcggcctggacatcggcaccaactctgtgggctgggccgtgatcaccgacgagtacaaggtgcccagcaagaaattcaaggtgctgggcaacaccgaccggcacagcatcaagaagaacctgatcggagccctgctgttcgacagcggcgaaacagccgaggccacccggctgaagagaaccgccagaagaagatacaccagacggaagaaccggatctgctatctgcaagagatcttcagcaacgagatggccaaggtggacgacagcttcttccacagactggaagagtccttcctggtggaagaggataagaagcacgagcggcaccccatcttcggcaacatcgtggacgaggtggcctaccacgagaagtaccccaccatctaccacctgagaaagaaactggtggacagcaccgacaaggccgacctgcggctgatctatctggccctggcccacatgatcaagttccggggccacttcctgatcgagggcgacctgaaccccgacaacagcgacgtggacaagctgttcatccagctggtgcagacctacaaccagctgttcgaggaaaaccccatcaacgccagcggcgtggacgccaaggccatcctgtctgccagactgagcaagagcagacggctggaaaatctgatcgcccagctgcccggcgagaagaagaatggcctgttcggaaacctgattgccctgagcctgggcctgacccccaacttcaagagcaacttcgacctggccgaggatgccaaactgcagctgagcaaggacacctacgacgacgacctggacaacctgctggcccagatcggcgaccagtacgccgacctgtttctggccgccaagaacctgtccgacgccatcctgctgagcgacatcctgagagtgaacaccgagatcaccaaggcccccctgagcgcctctatgatcaagagatacgacgagcaccaccaggacctgaccctgctgaaagctctcgtgcggcagcagctgcctgagaagtacaaagagattttcttcgaccagagcaagaacggctacgccggctacattgacggcggagccagccaggaagagttctacaagttcatcaagcccatcctggaaaagatggacggcaccgaggaactgctcgtgaagctgaacagagaggacctgctgcggaagcagcggaccttcgacaacggcagcatcccccaccagatccacctgggagagctgcacgccattctgcggcggcaggaagatttttacccattcctgaaggacaaccgggaaaagatcgagaagatcctgaccttccgcatcccctactacgtgggccctctggccaggggaaacagcagattcgcctggatgaccagaaagagcgaggaaaccatcaccccctggaacttcgaggaagtggtggacaagggcgcttccgcccagagcttcatcgagcggatgaccaacttcgataagaacctgcccaacgagaaggtgctgcccaagcacagcctgctgtacgagtacttcaccgtgtataacgagctgaccaaagtgaaatacgtgaccgagggaatgagaaagcccgccttcctgagcggcgagcagaaaaaggccatcgtggacctgctgttcaagaccaaccggaaagtgaccgtgaagcagctgaaagaggactacttcaagaaaatcgagtgcttcgactccgtggaaatctccggcgtggaagatcggttcaacgcctccctgggcacataccacgatctgctgaaaattatcaaggacaaggacttcctggacaatgaggaaaacgaggacattctggaagatatcgtgctgaccctgacactgtttgaggacagagagatgatcgaggaacggctgaaaacctatgcccacctgttcgacgacaaagtgatgaagcagctgaagcggcggagatacaccggctggggcaggctgagccggaagctgatcaacggcatccgggacaagcagtccggcaagacaatcctggatttcctgaagtccgacggcttcgccaacagaaacttcatgcagctgatccacgacgacagcctgacctttaaagaggacatccagaaagcccaggtgtccggccagggcgatagcctgcacgagcacattgccaatctggccggcagccccgccattaagaagggcatcctgcagacagtgaaggtggtggacgagctcgtgaaagtgatgggccggcacaagcccgagaacatcgtgatcgaaatggccagagagaaccagaccacccagaagggacagaagaacagccgcgagagaatgaagcggatcgaagagggcatcaaagagctgggcagccagatcctgaaagaacaccccgtggaaaacacccagctgcagaacgagaagctgtacctgtactacctgcagaatgggcgggatatgtacgtggaccaggaactggacatcaaccggctgtccgactacgatgtggacgctatcgtgcctcagagctttctgaaggacgactccatcgacaacaaggtgctgaccagaagcgacaagaaccggggcaagagcgacaacgtgccctccgaagaggtcgtgaagaagatgaagaactactggcggcagctgctgaacgccaagctgattacccagagaaagttcgacaatctgaccaaggccgagagaggcggcctgagcgaactggataaggccggcttcatcaagagacagctggtggaaacccggcagatcacaaagcacgtggcacagatcctggactcccggatgaacactaagtacgacgagaatgacaagctgatccgggaagtgaaagtgatcaccctgaagtccaagctggtgtccgatttccggaaggatttccagttttacaaagtgcgcgagatcaacaactaccaccacgcccacgacgcctacctgaacgccgtcgtgggaaccgccctgatcaaaaagtaccctaagctggaaagcgagttcgtgtacggcgactacaaggtgtacgacgtgcggaagatgatcgccaagagcgagcaggaaatcggcaaggctaccgccaagtacttcttctacagcaacatcatgaactttttcaagaccgagattaccctggccaacggcgagatccggaagcggcctctgatcgagacaaacggcgaaaccggggagatcgtgtgggataagggccgggattttgccaccgtgcggaaagtgctgagcatgccccaagtgaatatcgtgaaaaagaccgaggtgcagacaggcggcttcagcaaagagtctatcctgcccaagaggaacagcgataagctgatcgccagaaagaaggactgggaccctaagaagtacggcggcttcgacagccccaccgtggcctattctgtgctggtggtggccaaagtggaaaagggcaagtccaagaaactgaagagtgtgaaagagctgctggggatcaccatcatggaaagaagcagcttcgagaagaatcccatcgactttctggaagccaagggctacaaagaagtgaaaaaggacctgatcatcaagctgcctaagtactccctgttcgagctggaaaacggccggaagagaatgctggcctctgccggcgaactgcagaagggaaacgaactggccctgccctccaaatatgtgaacttcctgtacctggccagccactatgagaagctgaagggctcccccgaggataatgagcagaaacagctgtttgtggaacagcacaagcactacctggacgagatcatcgagcagatcagcgagttctccaagagagtgatcctggccgacgctaatctggacaaagtgctgtccgcctacaacaagcaccgggataagcccatcagagagcaggccgagaatatcatccacctgtttaccctgaccaatctgggagcccctgccgccttcaagtactttgacaccaccatcgaccggaagaggtacaccagcaccaaagaggtgctggacgccaccctgatccaccagagcatcaccggcctgtacgagacacggatcgacctgtctcagctgggaggtgactccggcggatctccagcccccgcccctgcccctgcccctgctcccagcggcggcagcaccctgaacatcgaggacgagtacaggctgcacgagaccagcaaggagcccgacgtgagcctgggcagcacctggctgagcgatttccctcaggcttgggccgagaccggcggcatgggcctggccgtgcggcaggcccccctgattatccccctgaaggccaccagcacccccgtgagcatcaagcagtacccaatgtcccaggaggccaggctgggcatcaagcctcacatccagaggctgctggaccagggcatcctggtgccatgccagtccccctggaacacccctctgctgcccgtgaagaagcctggcaccaacgactaccggcccgtgcaggacctgagagaagtgaacaagcgggtggaggacatccacccaaccgtgcccaacccttacaacctgctgtccggcctgccccccagccaccagtggtacaccgtgctggacctgaaggacgccttcttctgcctgagactgcaccccacctctcagcccctgttcgccttcgagtggcgcgaccccgagatgggcatcagcggccagctgacctggaccagactgccacagggctttaagaatagcccaaccctgtttaacgaggccctgcacagggacctggccgacttcaggatccagcaccccgacctgattctgctgcagtacgtggacgacctgctgctggccgctaccagcgagctggactgccagcagggcaccagagccctgctgcagaccctgggcaacctgggctacagagccagcgccaagaaggcccagatctgtcagaagcaggtgaagtatctgggctacctgctgaaggaaggccagagatggctgaccgaggccagaaaggagactgtgatgggccagcccacccccaagacccccaggcagctgcgggagttcctgggcaaggccggcttttgcagactgtttatccctggcttcgccgagatggccgccccactgtaccctctgaccaagcctggcaccctgtttaactggggccccgaccagcagaaggcctaccaggagatcaagcaggccctgctgaccgcccccgccctgggcctgcccgacctgaccaagcctttcgagctgttcgtggacgagaagcagggatacgccaaaggcgtgctgacccagaagctgggcccctggcggaggcccgtggcctacctgagcaaaaaactggaccctgtggccgccggctggcccccatgcctgcggatggtggccgccatcgctgtgctgaccaaggacgccggcaagctgaccatgggccagcccctggtgatcctggcccctcacgccgtggaggctctggtgaagcagcctccagacaggtggctgtccaacgccaggatgacccactaccaggccctgctgctggacaccgaccgggtgcagttcggccctgtggtggccctgaaccccgccaccctgctgcctctgccagaggagggcctgcagcacaactgcctggacatcctggccgaggcccacggcaccaggcccgacctgaccgaccagcccctgcctgacgccgaccacacctggtacaccgacggcagctccctgctgcaggagggccagaggaaggccggcgccgccgtgaccaccgagaccgaggtgatctgggccaaagccctgcctgccggcacctccgcccagcgggccgagctgatcgccctgacccaggccctgaagatggctgagggcaagaagctgaacgtgtacaccgattccagatacgccttcgccaccgcccacatccacggcgagatctacagaagaaggggctggctgacctccgagggcaaggagatcaagaacaaggacgagattctggccctgctgaaggccctgttcctgcctaagagactgagcatcatccactgtcccggccaccagaagggccacagcgccgaggccagaggcaatagaatggccgaccaggccgccagaaaggccgccatcaccgagacccccgacaccagcaccctgctgatcgagaacagcagcccc

SEQ ID NO: 151 - RNA, 6189 nt, synthetic construct
  misc_feature 1..6189: note = Description of Artificial Sequence: Synthetic polynucleotide
  source 1..6189: mol_type = other RNA
gacaagaagtacagcatcggcctggacatcggcaccaactctgtgggctgggccgtgatcaccgacgagtacaaggtgcccagcaagaaattcaaggtgctgggcaacaccgaccggcacagcatcaagaagaacctgatcggagccctgctgttcgacagcggcgaaacagccgaggccacccggctgaagagaaccgccagaagaagatacaccagacggaagaaccggatctgctatctgcaagagatcttcagcaacgagatggccaaggtggacgacagcttcttccacagactggaagagtccttcctggtggaagaggataagaagcacgagcggcaccccatcttcggcaacatcgtggacgaggtggcctaccacgagaagtaccccaccatctaccacctgagaaagaaactggtggacagcaccgacaaggccgacctgcggctgatctatctggccctggcccacatgatcaagttccggggccacttcctgatcgagggcgacctgaaccccgacaacagcgacgtggacaagctgttcatccagctggtgcagacctacaaccagctgttcgaggaaaaccccatcaacgccagcggcgtggacgccaaggccatcctgtctgccagactgagcaagagcagacggctggaaaatctgatcgcccagctgcccggcgagaagaagaatggcctgttcggaaacctgattgccctgagcctgggcctgacccccaacttcaagagcaacttcgacctggccgaggatgccaaactgcagctgagcaaggacacctacgacgacgacctggacaacctgctggcccagatcggcgaccagtacgccgacctgtttctggccgccaagaacctgtccgacgccatcctgctgagcgacatcctgagagtgaacaccgagatcaccaaggcccccctgagcgcctctatgatcaagagatacgacgagcaccaccaggacctgaccctgctgaaagctctcgtgcggcagcagctgcctgagaagtacaaagagattttcttcgaccagagcaagaacggctacgccggctacattgacggcggagccagccaggaagagttctacaagttcatcaagcccatcctggaaaagatggacggcaccgaggaactgctcgtgaagctgaacagagaggacctgctgcggaagcagcggaccttcgacaacggcagcatcccccaccagatccacctgggagagctgcacgccattctgcggcggcaggaagatttttacccattcctgaaggacaaccgggaaaagatcgagaagatcctgaccttccgcatcccctactacgtgggccctctggccaggggaaacagcagattcgcctggatgaccagaaagagcgaggaaaccatcaccccctggaacttcgaggaagtggtggacaagggcgcttccgcccagagcttcatcgagcggatgaccaacttcgataagaacctgcccaacgagaaggtgctgcccaagcacagcctgctgtacgagtacttcaccgtgtataacgagctgaccaaagtgaaatacgtgaccgagggaatgagaaagcccgccttcctgagcggcgagcagaaaaaggccatcgtggacctgctgttcaagaccaaccggaaagtgaccgtgaagcagctgaaagaggactacttcaagaaaatcgagtgcttcgactccgtggaaatctccggcgtggaagatcggttcaacgcctccctgggcacataccacgatctgctgaaaattatcaaggacaaggacttcctggacaatgaggaaaacgaggacattctggaagatatcgtgctgaccctgacactgtttgaggacagagagatgatcgaggaacggctgaaaacctatgcccacctgttcgacgacaaagtgatgaagcagctgaagcggcggagatacaccggctggggcaggctgagccggaagctgatcaacggcatccgggacaagcagtccggcaagacaatcctggatttcctgaagtccgacggcttcgccaacagaaacttcatgcagctgatccacgacgacagcctgacctttaaagaggacatccagaaagcccaggtgtccggccagggcgatagcctgcacgagcacattgccaatctggccggcagccccgccattaagaagggcatcctgcagacagtgaaggtggtggacgagctcgtgaaagtgatgggccggcacaagcccgagaacatcgtgatcgaaatggccagagagaaccagaccacccagaagggacagaagaacagccgcgagagaatgaagcggatcgaagagggcatcaaagagctgggcagccagatcctgaaagaacaccccgtggaaaacacccagctgcagaacgagaagctgtacctgtactacctgcagaatgggcgggatatgtacgtggaccaggaactggacatcaaccggctgtccgactacgatgtggacgctatcgtgcctcagagctttctgaaggacgactccatcgacaacaaggtgctgaccagaagcgacaagaaccggggcaagagcgacaacgtgccctccgaagaggtcgtgaagaagatgaagaactactggcggcagctgctgaacgccaagctgattacccagagaaagttcgacaatctgaccaaggccgagagaggcggcctgagcgaactggataaggccggcttcatcaagagacagctggtggaaacccggcagatcacaaagcacgtggcacagatcctggactcccggatgaacactaagtacgacgagaatgacaagctgatccgggaagtgaaagtgatcaccctgaagtccaagctggtgtccgatttccggaaggatttccagttttacaaagtgcgcgagatcaacaactaccaccacgcccacgacgcctacctgaacgccgtcgtgggaaccgccctgatcaaaaagtaccctaagctggaaagcgagttcgtgtacggcgactacaaggtgtacgacgtgcggaagatgatcgccaagagcgagcaggaaatcggcaaggctaccgccaagtacttcttctacagcaacatcatgaactttttcaagaccgagattaccctggccaacggcgagatccggaagcggcctctgatcgagacaaacggcgaaaccggggagatcgtgtgggataagggccgggattttgccaccgtgcggaaagtgctgagcatgccccaagtgaatatcgtgaaaaagaccgaggtgcagacaggcggcttcagcaaagagtctatcctgcccaagaggaacagcgataagctgatcgccagaaagaaggactgggaccctaagaagtacggcggcttcgacagccccaccgtggcctattctgtgctggtggtggccaaagtggaaaagggcaagtccaagaaactgaagagtgtgaaagagctgctggggatcaccatcatggaaagaagcagcttcgagaagaatcccatcgactttctggaagccaagggctacaaagaagtgaaaaaggacctgatcatcaagctgcctaagtactccctgttcgagctggaaaacggccggaagagaatgctggcctctgccggcgaactgcagaagggaaacgaactggccctgccctccaaatatgtgaacttcctgtacctggccagccactatgagaagctgaagggctcccccgaggataatgagcagaaacagctgtttgtggaacagcacaagcactacctggacgagatcatcgagcagatcagcgagttctccaagagagtgatcctggccgacgctaatctggacaaagtgctgtccgcctacaacaagcaccgggataagcccatcagagagcaggccgagaatatcatccacctgtttaccctgaccaatctgggagcccctgccgccttcaagtactttgacaccaccatcgaccggaagaggtacaccagcaccaaagaggtgctggacgccaccctgatccaccagagcatcaccggcctgtacgagacacggatcgacctgtctcagctgggaggtgactccggcggatctccagcccccgcccctgcccctgcccctgctcccagcggcggcagcaccctgaacatcgaggacgagtacaggctgcacgagaccagcaaggagcccgacgtgagcctgggcagcacctggctgagcgatttccctcaggcttgggccgagaccggcggcatgggcctggccgtgcggcaggcccccctgattatccccctgaaggccaccagcacccccgtgagcatcaagcagtacccaatgtcccaggaggccaggctgggcatcaagcctcacatccagaggctgctggaccagggcatcctggtgccatgccagtccccctggaacacccctctgctgcccgtgaagaagcctggcaccaacgactaccggcccgtgcaggacctgagagaagtgaacaagcgggtggaggacatccacccaaccgtgcccaacccttacaacctgctgtccggcctgccccccagccaccagtggtacaccgtgctggacctgaaggacgccttcttctgcctgagactgcaccccacctctcagcccctgttcgccttcgagtggcgcgaccccgagatgggcatcagcggccagctgacctggaccagactgccacagggctttaagaatagcccaaccctgtttaacgaggccctgcacagggacctggccgacttcaggatccagcaccccgacctgattctgctgcagtacgtggacgacctgctgctggccgctaccagcgagctggactgccagcagggcaccagagccctgctgcagaccctgggcaacctgggctacagagccagcgccaagaaggcccagatctgtcagaagcaggtgaagtatctgggctacctgctgaaggaaggccagagatggctgaccgaggccagaaaggagactgtgatgggccagcccacccccaagacccccaggcagctgcgggagttcctgggcaaggccggcttttgcagactgtttatccctggcttcgccgagatggccgccccactgtaccctctgaccaagcctggcaccctgtttaactggggccccgaccagcagaaggcctaccaggagatcaagcaggccctgctgaccgcccccgccctgggcctgcccgacctgaccaagcctttcgagctgttcgtggacgagaagcagggatacgccaaaggcgtgctgacccagaagctgggcccctggcggaggcccgtggcctacctgagcaaaaaactggaccctgtggccgccggctggcccccatgcctgcggatggtggccgccatcgctgtgctgaccaaggacgccggcaagctgaccatgggccagcccctggtgatcctggcccctcacgccgtggaggctctggtgaagcagcctccagacaggtggctgtccaacgccaggatgacccactaccaggccctgctgctggacaccgaccgggtgcagttcggccctgtggtggccctgaaccccgccaccctgctgcctctgccagaggagggcctgcagcacaactgcctggacatcctggccgaggcccacggcaccaggcccgacctgaccgaccagcccctgcctgacgccgaccacacctggtacaccgacggcagctccctgctgcaggagggccagaggaaggccggcgccgccgtgaccaccgagaccgaggtgatctgggccaaagccctgcctgccggcacctccgcccagcgggccgagctgatcgccctgacccaggccctgaagatggctgagggcaagaagctgaacgtgtacaccgattccagatacgccttcgccaccgcccacatccacggcgagatctacagaagaaggggctggctgacctccgagggcaaggagatcaagaacaaggacgagattctggccctgctgaaggccctgttcctgcctaagagactgagcatcatccactgtcccggccaccagaagggccacagcgccgaggccagaggcaatagaatggccgaccaggccgccagaaaggccgccatcaccgagacccccgacaccagcaccctgctgatcgagaacagcagcccc

SEQ ID NO: 152 - protein, 1890 aa, synthetic construct
  REGION 1..1890: note = Description of Artificial Sequence: Synthetic polypeptide
DKKYSIGLDIGTNSVGWAVITDEYKVPSKKFKVLGNTDRHSIKKNLIGALLFDSGETAEATRLKRTARRRYTRRKNRICYLQEIFSNEMAKVDDSFFHRLEESFLVEEDKKHERHPIFGNIVDEVAYHEKYPTIYHLRKKLVDSTDKADLRLIYLALAHMIKFRGHFLIEGDLNPDNSDVDKLFIQLVQTYNQLFEENPINASGVDAKAILSARLSKSRRLENLIAQLPGEKKNGLFGNLIALSLGLTPNFKSNFDLAEDAKLQLSKDTYDDDLDNLLAQIGDQYADLFLAAKNLSDAILLSDILRVNTEITKAPLSASMIKRYDEHHQDLTLLKALVRQQLPEKYKEIFFDQSKNGYAGYIDGGASQEEFYKFIKPILEKMDGTEELLVKLNREDLLRKQRTFDNGSIPHQIHLGELHAILRRQEDFYPFLKDNREKIEKILTFRIPYYVGPLARGNSRFAWMTRKSEETITPWNFEEVVDKGASAQSFIERMTNFDKNLPNEKVLPKHSLLYEYFTVYNELTKVKYVTEGMRKPAFLSGEQKKAIVDLLFKTNRKVTVKQLKEDYFKKIECFDSVEISGVEDRFNASLGTYHDLLKIIKDKDFLDNEENEDILEDIVLTLTLFEDREMIEERLKTYAHLFDDKVMKQLKRRRYTGWGRLSRKLINGIRDKQSGKTILDFLKSDGFANRNFMQLIHDDSLTFKEDIQKAQVSGQGDSLHEHIANLAGSPAIKKGILQTVKVVDELVKVMGRHKPENIVIEMARENQTTQKGQKNSRERMKRIEEGIKELGSQILKEHPVENTQLQNEKLYLYYLQNGRDMYVDQELDINRLSDYDVDAIVPQSFLKDDSIDNKVLTRSDKNRGKSDNVPSEEVVKKMKNYWRQLLNAKLITQRKFDNLTKAERGGLSELDKAGFIKRQLVETRQITKHVAQILDSRMNTKYDENDKLIREVKVITLKSKLVSDFRKDFQFYKVREINNYHHAHDAYLNAVVGTALIKKYPKLESEFVYGDYKVYDVRKMIAKSEQEIGKATAKYFFYSNIMNFFKTEITLANGEIRKRPLIETNGETGEIVWDKGRDFATVRKVLSMPQVNIVKKTEVQTGGFSKESILPKRNSDKLIARKKDWDPKKYGGFDSPTVAYSVLVVAKVEKGKSKKLKSVKELLGITIMERSSFEKNPIDFLEAKGYKEVKKDLIIKLPKYSLFELENGRKRMLASAGELQKGNELALPSKYVNFLYLASHYEKLKGSPEDNEQKQLFVEQHKHYLDEIIEQISEFSKRVILADANLDKVLSAYNKHRDKPIREQAENIIHLFTLTNLGAPAAFKYFDTTIDRKRYTSTKEVLDATLIHQSITGLYETRIDLSQLGGDSGGSPAPAPAPAPAPSGGSTLNIEDEYRLHETSKEPDVSLGSTWLSDFPQAWAETGGMGLAVRQAPLIIPLKATSTPVSIKQYPMSQEARLGIKPHIQRLLDQGILVPCQSPWNTPLLPVKKPGTNDYRPVQDLREVNKRVEDIHPTVPNPYNLLSGLPPSHQWYTVLDLKDAFFCLRLHPTSQPLFAFEWRDPEMGISGQLTWTRLPQGFKNSPTLFNEALHRDLADFRIQHPDLILLQYVDDLLLAATSELDCQQGTRALLQTLGNLGYRASAKKAQICQKQVKYLGYLLKEGQRWLTEARKETVMGQPTPKTPRQLREFLGKAGFCRLFIPGFAEMAAPLYPLTKPGTLFNWGPDQQKAYQEIKQALLTAPALGLPDLTKPFELFVDEKQGYAKGVLTQKLGPWRRPVAYLSKKLDPVAAGWPPCLRMVAAIAVLTKDAGKLTMGQPLVILAPHAVEALVKQPPDRWLSNARMTHYQALLLDTDRVQFGPVVALNPATLLPLPEEGLQHNCLDILAEAHG

SEQ ID NO: 153 - DNA, 5670 bp, synthetic construct
  misc_feature 1..5670: note = Description of Artificial Sequence: Synthetic polynucleotide
  source 1..5670: mol_type = other DNA
gacaagaagtacagcatcggcctggacatcggcaccaactctgtgggctgggccgtgatcaccgacgagtacaaggtgcccagcaagaaattcaaggtgctgggcaacaccgaccggcacagcatcaagaagaacctgatcggagccctgctgttcgacagcggcgaaacagccgaggccacccggctgaagagaaccgccagaagaagatacaccagacggaagaaccggatctgctatctgcaagagatcttcagcaacgagatggccaaggtggacgacagcttcttccacagactggaagagtccttcctggtggaagaggataagaagcacgagcggcaccccatcttcggcaacatcgtggacgaggtggcctaccacgagaagtaccccaccatctaccacctgagaaagaaactggtggacagcaccgacaaggccgacctgcggctgatctatctggccctggcccacatgatcaagttccggggccacttcctgatcgagggcgacctgaaccccgacaacagcgacgtggacaagctgttcatccagctggtgcagacctacaaccagctgttcgaggaaaaccccatcaacgccagcggcgtggacgccaaggccatcctgtctgccagactgagcaagagcagacggctggaaaatctgatcgcccagctgcccggcgagaagaagaatggcctgttcggaaacctgattgccctgagcctgggcctgacccccaacttcaagagcaacttcgacctggccgaggatgccaaactgcagctgagcaaggacacctacgacgacgacctggacaacctgctggcccagatcggcgaccagtacgccgacctgtttctggccgccaagaacctgtccgacgccatcctgctgagcgacatcctgagagtgaacaccgagatcaccaaggcccccctgagcgcctctatgatcaagagatacgacgagcaccaccaggacctgaccctgctgaaagctctcgtgcggcagcagctgcctgagaagtacaaagagattttcttcgaccagagcaagaacggctacgccggctacattgacggcggagccagccaggaagagttctacaagttcatcaagcccatcctggaaaagatggacggcaccgaggaactgctcgtgaagctgaacagagaggacctgctgcggaagcagcggaccttcgacaacggcagcatcccccaccagatccacctgggagagctgcacgccattctgcggcggcaggaagatttttacccattcctgaaggacaaccgggaaaagatcgagaagatcctgaccttccgcatcccctactacgtgggccctctggccaggggaaacagcagattcgcctggatgaccagaaagagcgaggaaaccatcaccccctggaacttcgaggaagtggtggacaagggcgcttccgcccagagcttcatcgagcggatgaccaacttcgataagaacctgcccaacgagaaggtgctgcccaagcacagcctgctgtacgagtacttcaccgtgtataacgagctgaccaaagtgaaatacgtgaccgagggaatgagaaagcccgccttcctgagcggcgagcagaaaaaggccatcgtggacctgctgttcaagaccaaccggaaagtgaccgtgaagcagctgaaagaggactacttcaagaaaatcgagtgcttcgactccgtggaaatctccggcgtggaagatcggttcaacgcctccctgggcacataccacgatctgctgaaaattatcaaggacaaggacttcctggacaatgaggaaaacgaggacattctggaagatatcgtgctgaccctgacactgtttgaggacagagagatgatcgaggaacggctgaaaacctatgcccacctgttcgacgacaaagtgatgaagcagctgaagcggcggagatacaccggctggggcaggctgagccggaagctgatcaacggcatccgggacaagcagtccggcaagacaatcctggatttcctgaagtccgacggcttcgccaacagaaacttcatgcagctgatccacgacgacagcctgacctttaaagaggacatccagaaagcccaggtgtccggccagggcgatagcctgcacgagcacattgccaatctggccggcagccccgccattaagaagggcatcctgcagacagtgaaggtggtggacgagctcgtgaaagtgatgggccggcacaagcccgagaacatcgtgatcgaaatggccagagagaaccagaccacccagaagggacagaagaacagccgcgagagaatgaagcggatcgaagagggcatcaaagagctgggcagccagatcctgaaagaacaccccgtggaaaacacccagctgcagaacgagaagctgtacctgtactacctgcagaatgggcgggatatgtacgtggaccaggaactggacatcaaccggctgtccgactacgatgtggacgctatcgtgcctcagagctttctgaaggacgactccatcgacaacaaggtgctgaccagaagcgacaagaaccggggcaagagcgacaacgtgccctccgaagaggtcgtgaagaagatgaagaactactggcggcagctgctgaacgccaagctgattacccagagaaagttcgacaatctgaccaaggccgagagaggcggcctgagcgaactggataaggccggcttcatcaagagacagctggtggaaacccggcagatcacaaagcacgtggcacagatcctggactcccggatgaacactaagtacgacgagaatgacaagctgatccgggaagtgaaagtgatcaccctgaagtccaagctggtgtccgatttccggaaggatttccagttttacaaagtgcgcgagatcaacaactaccaccacgcccacgacgcctacctgaacgccgtcgtgggaaccgccctgatcaaaaagtaccctaagctggaaagcgagttcgtgtacggcgactacaaggtgtacgacgtgcggaagatgatcgccaagagcgagcaggaaatcggcaaggctaccgccaagtacttcttctacagcaacatcatgaactttttcaagaccgagattaccctggccaacggcgagatccggaagcggcctctgatcgagacaaacggcgaaaccggggagatcgtgtgggataagggccgggattttgccaccgtgcggaaagtgctgagcatgccccaagtgaatatcgtgaaaaagaccgaggtgcagacaggcggcttcagcaaagagtctatcctgcccaagaggaacagcgataagctgatcgccagaaagaaggactgggaccctaagaagtacggcggcttcgacagccccaccgtggcctattctgtgctggtggtggccaaagtggaaaagggcaagtccaagaaactgaagagtgtgaaagagctgctggggatcaccatcatggaaagaagcagcttcgagaagaatcccatcgactttctggaagccaagggctacaaagaagtgaaaaaggacctgatcatcaagctgcctaagtactccctgttcgagctggaaaacggccggaagagaatgctggcctctgccggcgaactgcagaagggaaacgaactggccctgccctccaaatatgtgaacttcctgtacctggccagccactatgagaagctgaagggctcccccgaggataatgagcagaaacagctgtttgtggaacagcacaagcactacctggacgagatcatcgagcagatcagcgagttctccaagagagtgatcctggccgacgctaatctggacaaagtgctgtccgcctacaacaagcaccgggataagcccatcagagagcaggccgagaatatcatccacctgtttaccctgaccaatctgggagcccctgccgccttcaagtactttgacaccaccatcgaccggaagaggtacaccagcaccaaagaggtgctggacgccaccctgatccaccagagcatcaccggcctgtacgagacacggatcgacctgtctcagctgggaggtgactccggcggatctccagcccccgcccctgcccctgcccctgctcccagcggcggcagcaccctgaacatcgaggacgagtacaggctgcacgagaccagcaaggagcccgacgtgagcctgggcagcacctggctgagcgatttccctcaggcttgggccgagaccggcggcatgggcctggccgtgcggcaggcccccctgattatccccctgaaggccaccagcacccccgtgagcatcaagcagtacccaatgtcccaggaggccaggctgggcatcaagcctcacatccagaggctgctggaccagggcatcctggtgccatgccagtccccctggaacacccctctgctgcccgtgaagaagcctggcaccaacgactaccggcccgtgcaggacctgagagaagtgaacaagcgggtggaggacatccacccaaccgtgcccaacccttacaacctgctgtccggcctgccccccagccaccagtggtacaccgtgctggacctgaaggacgccttcttctgcctgagactgcaccccacctctcagcccctgttcgccttcgagtggcgcgaccccgagatgggcatcagcggccagctgacctggaccagactgccacagggctttaagaatagcccaaccctgtttaacgaggccctgcacagggacctggccgacttcaggatccagcaccccgacctgattctgctgcagtacgtggacgacctgctgctggccgctaccagcgagctggactgccagcagggcaccagagccctgctgcagaccctgggcaacctgggctacagagccagcgccaagaaggcccagatctgtcagaagcaggtgaagtatctgggctacctgctgaaggaaggccagagatggctgaccgaggccagaaaggagactgtgatgggccagcccacccccaagacccccaggcagctgcgggagttcctgggcaaggccggcttttgcagactgtttatccctggcttcgccgagatggccgccccactgtaccctctgaccaagcctggcaccctgtttaactggggccccgaccagcagaaggcctaccaggagatcaagcaggccctgctgaccgcccccgccctgggcctgcccgacctgaccaagcctttcgagctgttcgtggacgagaagcagggatacgccaaaggcgtgctgacccagaagctgggcccctggcggaggcccgtggcctacctgagcaaaaaactggaccctgtggccgccggctggcccccatgcctgcggatggtggccgccatcgctgtgctgaccaaggacgccggcaagctgaccatgggccagcccctggtgatcctggcccctcacgccgtggaggctctggtgaagcagcctccagacaggtggctgtccaacgccaggatgacccactaccaggccctgctgctggacaccgaccgggtgcagttcggccctgtggtggccctgaaccccgccaccctgctgcctctgccagaggagggcctgcagcacaactgcctggacatcctggccgaggcccacggc

SEQ ID NO: 154 - RNA, 5670 nt, synthetic construct
  misc_feature 1..5670: note = Description of Artificial Sequence: Synthetic polynucleotide
  source 1..5670: mol_type = other RNA
gacaagaagtacagcatcggcctggacatcggcaccaactctgtgggctgggccgtgatcaccgacgagtacaaggtgcccagcaagaaattcaaggtgctgggcaacaccgaccggcacagcatcaagaagaacctgatcggagccctgctgttcgacagcggcgaaacagccgaggccacccggctgaagagaaccgccagaagaagatacaccagacggaagaaccggatctgctatctgcaagagatcttcagcaacgagatggccaaggtggacgacagcttcttccacagactggaagagtccttcctggtggaagaggataagaagcacgagcggcaccccatcttcggcaacatcgtggacgaggtggcctaccacgagaagtaccccaccatctaccacctgagaaagaaactggtggacagcaccgacaaggccgacctgcggctgatctatctggccctggcccacatgatcaagttccggggccacttcctgatcgagggcgacctgaaccccgacaacagcgacgtggacaagctgttcatccagctggtgcagacctacaaccagctgttcgaggaaaaccccatcaacgccagcggcgtggacgccaaggccatcctgtctgccagactgagcaagagcagacggctggaaaatctgatcgcccagctgcccggcgagaagaagaatggcctgttcggaaacctgattgccctgagcctgggcctgacccccaacttcaagagcaacttcgacctggccgaggatgccaaactgcagctgagcaaggacacctacgacgacgacctggacaacctgctggcccagatcggcgaccagtacgccgacctgtttctggccgccaagaacctgtccgacgccatcctgctgagcgacatcctgagagtgaacaccgagatcaccaaggcccccctgagcgcctctatgatcaagagatacgacgagcaccaccaggacctgaccctgctgaaagctctcgtgcggcagcagctgcctgagaagtacaaagagattttcttcgaccagagcaagaacggctacgccggctacattgacggcggagccagccaggaagagttctacaagttcatcaagcccatcctggaaaagatggacggcaccgaggaactgctcgtgaagctgaacagagaggacctgctgcggaagcagcggaccttcgacaacggcagcatcccccaccagatccacctgggagagctgcacgccattctgcggcggcaggaagatttttacccattcctgaaggacaaccgggaaaagatcgagaagatcctgaccttccgcatcccctactacgtgggccctctggccaggggaaacagcagattcgcctggatgaccagaaagagcgaggaaaccatcaccccctggaacttcgaggaagtggtggacaagggcgcttccgcccagagcttcatcgagcggatgaccaacttcgataagaacctgcccaacgagaaggtgctgcccaagcacagcctgctgtacgagtacttcaccgtgtataacgagctgaccaaagtgaaatacgtgaccgagggaatgagaaagcccgccttcctgagcggcgagcagaaaaaggccatcgtggacctgctgttcaagaccaaccggaaagtgaccgtgaagcagctgaaagaggactacttcaagaaaatcgagtgcttcgactccgtggaaatctccggcgtggaagatcggttcaacgcctccctgggcacataccacgatctgctgaaaattatcaaggacaaggacttcctggacaatgaggaaaacgaggacattctggaagatatcgtgctgaccctgacactgtttgaggacagagagatgatcgaggaacggctgaaaacctatgcccacctgttcgacgacaaagtgatgaagcagctgaagcggcggagatacaccggctggggcaggctgagccggaagctgatcaacggcatccgggacaagcagtccggcaagacaatcctggatttcctgaagtccgacggcttcgccaacagaaacttcatgcagctgatccacgacgacagcctgacctttaaagaggacatccagaaagcccaggtgtccggccagggcgatagcctgcacgagcacattgccaatctggccggcagccccgccattaagaagggcatcctgcagacagtgaaggtggtggacgagctcgtgaaagtgatgggccggcacaagcccgagaacatcgtgatcgaaatggccagagagaaccagaccacccagaagggacagaagaacagccgcgagagaatgaagcggatcgaagagggcatcaaagagctgggcagccagatcctgaaagaacaccccgtggaaaacacccagctgcagaacgagaagctgtacctgtactacctgcagaatgggcgggatatgtacgtggaccaggaactggacatcaaccggctgtccgactacgatgtggacgctatcgtgcctcagagctttctgaaggacgactccatcgacaacaaggtgctgaccagaagcgacaagaaccggggcaagagcgacaacgtgccctccgaagaggtcgtgaagaagatgaagaactactggcggcagctgctgaacgccaagctgattacccagagaaagttcgacaatctgaccaaggccgagagaggcggcctgagcgaactggataaggccggcttcatcaagagacagctggtggaaacccggcagatcacaaagcacgtggcacagatcctggactcccggatgaacactaagtacgacgagaatgacaagctgatccgggaagtgaaagtgatcaccctgaagtccaagctggtgtccgatttccggaaggatttccagttttacaaagtgcgcgagatcaacaactaccaccacgcccacgacgcctacctgaacgccgtcgtgggaaccgccctgatcaaaaagtaccctaagctggaaagcgagttcgtgtacggcgactacaaggtgtacgacgtgcggaagatgatcgccaagagcgagcaggaaatcggcaaggctaccgccaagtacttcttctacagcaacatcatgaactttttcaagaccgagattaccctggccaacggcgagatccggaagcggcctctgatcgagacaaacggcgaaaccggggagatcgtgtgggataagggccgggattttgccaccgtgcggaaagtgctgagcatgccccaagtgaatatcgtgaaaaagaccgaggtgcagacaggcggcttcagcaaagagtctatcctgcccaagaggaacagcgataagctgatcgccagaaagaaggactgggaccctaagaagtacggcggcttcgacagccccaccgtggcctattctgtgctggtggtggccaaagtggaaaagggcaagtccaagaaactgaagagtgtgaaagagctgctggggatcaccatcatggaaagaagcagcttcgagaagaatcccatcgactttctggaagccaagggctacaaagaagtgaaaaaggacctgatcatcaagctgcctaagtactccctgttcgagctggaaaacggccggaagagaatgctggcctctgccggcgaactgcagaagggaaacgaactggccctgccctccaaatatgtgaacttcctgtacctggccagccactatgagaagctgaagggctcccccgaggataatgagcagaaacagctgtttgtggaacagcacaagcactacctggacgagatcatcgagcagatcagcgagttctccaagagagtgatcctggccgacgctaatctggacaaagtgctgtccgcctacaacaagcaccgggataagcccatcagagagcaggccgagaatatcatccacctgtttaccctgaccaatctgggagcccctgccgccttcaagtactttgacaccaccatcgaccggaagaggtacaccagcaccaaagaggtgctggacgccaccctgatccaccagagcatcaccggcctgtacgagacacggatcgacctgtctcagctgggaggtgactccggcggatctccagcccccgcccctgcccctgcccctgctcccagcggcggcagcaccctgaacatcgaggacgagtacaggctgcacgagaccagcaaggagcccgacgtgagcctgggcagcacctggctgagcgatttccctcaggcttgggccgagaccggcggcatgggcctggccgtgcggcaggcccccctgattatccccctgaaggccaccagcacccccgtgagcatcaagcagtacccaatgtcccaggaggccaggctgggcatcaagcctcacatccagaggctgctggaccagggcatcctggtgccatgccagtccccctggaacacccctctgctgcccgtgaagaagcctggcaccaacgactaccggcccgtgcaggacctgagagaagtgaacaagcgggtggaggacatccacccaaccgtgcccaacccttacaacctgctgtccggcctgccccccagccaccagtggtacaccgtgctggacctgaaggacgccttcttctgcctgagactgcaccccacctctcagcccctgttcgccttcgagtggcgcgaccccgagatgggcatcagcggccagctgacctggaccagactgccacagggctttaagaatagcccaaccctgtttaacgaggccctgcacagggacctggccgacttcaggatccagcaccccgacctgattctgctgcagtacgtggacgacctgctgctggccgctaccagcgagctggactgccagcagggcaccagagccctgctgcagaccctgggcaacctgggctacagagccagcgccaagaaggcccagatctgtcagaagcaggtgaagtatctgggctacctgctgaaggaaggccagagatggctgaccgaggccagaaaggagactgtgatgggccagcccacccccaagacccccaggcagctgcgggagttcctgggcaaggccggcttttgcagactgtttatccctggcttcgccgagatggccgccccactgtaccctctgaccaagcctggcaccctgtttaactggggccccgaccagcagaaggcctaccaggagatcaagcaggccctgctgaccgcccccgccctgggcctgcccgacctgaccaagcctttcgagctgttcgtggacgagaagcagggatacgccaaaggcgtgctgacccagaagctgggcccctggcggaggcccgtggcctacctgagcaaaaaactggaccctgtggccgccggctggcccccatgcctgcggatggtggccgccatcgctgtgctgaccaaggacgccggcaagctgaccatgggccagcccctggtgatcctggcccctcacgccgtggaggctctggtgaagcagcctccagacaggtggctgtccaacgccaggatgacccactaccaggccctgctgctggacaccgaccgggtgcagttcggccctgtggtggccctgaaccccgccaccctgctgcctctgccagaggagggcctgcagcacaactgcctggacatcctggccgaggcccacggc

SEQ ID NO: 155 - protein, 2069 aa, synthetic construct
  REGION 1..2069: note = Description of Artificial Sequence: Synthetic polypeptide
DKKYSIGLDIGTNSVGWAVITDEYKVPSKKFKVLGNTDRHSIKKNLIGALLFDSGETAEATRLKRTARRRYTRRKNRICYLQEIFSNEMAKVDDSFFHRLEESFLVEEDKKHERHPIFGNIVDEVAYHEKYPTIYHLRKKLVDSTDKADLRLIYLALAHMIKFRGHFLIEGDLNPDNSDVDKLFIQLVQTYNQLFEENPINASGVDAKAILSARLSKSRRLENLIAQLPGEKKNGLFGNLIALSLGLTPNFKSNFDLAEDAKLQLSKDTYDDDLDNLLAQIGDQYADLFLAAKNLSDAILLSDILRVNTEITKAPLSASMIKRYDEHHQDLTLLKALVRQQLPEKYKEIFFDQSKNGYAGYIDGGASQEEFYKFIKPILEKMDGTEELLVKLNREDLLRKQRTFDNGSIPHQIHLGELHAILRRQEDFYPFLKDNREKIEKILTFRIPYYVGPLARGNSRFAWMTRKSEETITPWNFEEVVDKGASAQSFIERMTNFDKNLPNEKVLPKHSLLYEYFTVYNELTKVKYVTEGMRKPAFLSGEQKKAIVDLLFKTNRKVTVKQLKEDYFKKIECFDSVEISGVEDRFNASLGTYHDLLKIIKDKDFLDNEENEDILEDIVLTLTLFEDREMIEERLKTYAHLFDDKVMKQLKRRRYTGWGRLSRKLINGIRDKQSGKTILDFLKSDGFANRNFMQLIHDDSLTFKEDIQKAQVSGQGDSLHEHIANLAGSPAIKKGILQTVKVVDELVKVMGRHKPENIVIEMARENQTTQKGQKNSRERMKRIEEGIKELGSQILKEHPVENTQLQNEKLYLYYLQNGRDMYVDQELDINRLSDYDVDAIVPQSFLKDDSIDNKVLTRSDKNRGKSDNVPSEEVVKKMKNYWRQLLNAKLITQRKFDNLTKAERGGLSELDKAGFIKRQLVETRQITKHVAQILDSRMNTKYDENDKLIREVKVITLKSKLVSDFRKDFQFYKVREINNYHHAHDAYLNAVVGTALIKKYPKLESEFVYGDYKVYDVRKMIAKSEQEIGKATAKYFFYSNIMNFFKTEITLANGEIRKRPLIETNGETGEIVWDKGRDFATVRKVLSMPQVNIVKKTEVQTGGFSKESILPKRNSDKLIARKKDWDPKKYGGFDSPTVAYSVLVVAKVEKGKSKKLKSVKELLGITIMERSSFEKNPIDFLEAKGYKEVKKDLIIKLPKYSLFELENGRKRMLASAGELQKGNELALPSKYVNFLYLASHYEKLKGSPEDNEQKQLFVEQHKHYLDEIIEQISEFSKRVILADANLDKVLSAYNKHRDKPIREQAENIIHLFTLTNLGAPAAFKYFDTTIDRKRYTSTKEVLDATLIHQSITGLYETRIDLSQLGGDSGGSPAPAPAPAPAPAPAPAPSGGSTLNIEDEYRLHETSKEPDVSLGSTWLSDFPQAWAETGGMGLAVRQAPLIIPLKATSTPVSIKQYPMSQEARLGIKPHIQRLLDQGILVPCQSPWNTPLLPVKKPGTNDYRPVQDLREVNKRVEDIHPTVPNPYNLLSGLPPSHQWYTVLDLKDAFFCLRLHPTSQPLFAFEWRDPEMGISGQLTWTRLPQGFKNSPTLFNEALHRDLADFRIQHPDLILLQYVDDLLLAATSELDCQQGTRALLQTLGNLGYRASAKKAQICQKQVKYLGYLLKEGQRWLTEARKETVMGQPTPKTPRQLREFLGKAGFCRLFIPGFAEMAAPLYPLTKPGTLFNWGPDQQKAYQEIKQALLTAPALGLPDLTKPFELFVDEKQGYAKGVLTQKLGPWRRPVAYLSKKLDPVAAGWPPCLRMVAAIAVLTKDAGKLTMGQPLVILAPHAVEALVKQPPDRWLSNARMTHYQALLLDTDRVQFGPVVALNPATLLPLPEEGLQHNCLDILAEAHGTRPDLTDQPLPDADHTWYTDGSSLLQEGQRKAGAAVTTETEVIWAKALPAGTSAQRAELIALTQALKMAEGKKLNVYTDSRYAFATAHIHGEIYRRRGWLTSEGKEIKNKDEILALLKALFLPKRLSIIHCPGHQKGHSAEARGNRMADQAARKAAITETPDTSTLLIENSSP

SEQ ID NO: 156 - DNA, 6207 bp, synthetic construct
  misc_feature 1..6207: note = Description of Artificial Sequence: Synthetic polynucleotide
  source 1..6207: mol_type = other DNA
gacaagaagtacagcatcggcctggacatcggcaccaactctgtgggctgggccgtgatcaccgacgagtacaaggtgcccagcaagaaattcaaggtgctgggcaacaccgaccggcacagcatcaagaagaacctgatcggagccctgctgttcgacagcggcgaaacagccgaggccacccggctgaagagaaccgccagaagaagatacaccagacggaagaaccggatctgctatctgcaagagatcttcagcaacgagatggccaaggtggacgacagcttcttccacagactggaagagtccttcctggtggaagaggataagaagcacgagcggcaccccatcttcggcaacatcgtggacgaggtggcctaccacgagaagtaccccaccatctaccacctgagaaagaaactggtggacagcaccgacaaggccgacctgcggctgatctatctggccctggcccacatgatcaagttccggggccacttcctgatcgagggcgacctgaaccccgacaacagcgacgtggacaagctgttcatccagctggtgcagacctacaaccagctgttcgaggaaaaccccatcaacgccagcggcgtggacgccaaggccatcctgtctgccagactgagcaagagcagacggctggaaaatctgatcgcccagctgcccggcgagaagaagaatggcctgttcggaaacctgattgccctgagcctgggcctgacccccaacttcaagagcaacttcgacctggccgaggatgccaaactgcagctgagcaaggacacctacgacgacgacctggacaacctgctggcccagatcggcgaccagtacgccgacctgtttctggccgccaagaacctgtccgacgccatcctgctgagcgacatcctgagagtgaacaccgagatcaccaaggcccccctgagcgcctctatgatcaagagatacgacgagcaccaccaggacctgaccctgctgaaagctctcgtgcggcagcagctgcctgagaagtacaaagagattttcttcgaccagagcaagaacggctacgccggctacattgacggcggagccagccaggaagagttctacaagttcatcaagcccatcctggaaaagatggacggcaccgaggaactgctcgtgaagctgaacagagaggacctgctgcggaagcagcggaccttcgacaacggcagcatcccccaccagatccacctgggagagctgcacgccattctgcggcggcaggaagatttttacccattcctgaaggacaaccgggaaaagatcgagaagatcctgaccttccgcatcccctactacgtgggccctctggccaggggaaacagcagattcgcctggatgaccagaaagagcgaggaaaccatcaccccctggaacttcgaggaagtggtggacaagggcgcttccgcccagagcttcatcgagcggatgaccaacttcgataagaacctgcccaacgagaaggtgctgcccaagcacagcctgctgtacgagtacttcaccgtgtataacgagctgaccaaagtgaaatacgtgaccgagggaatgagaaagcccgccttcctgagcggcgagcagaaaaaggccatcgtggacctgctgttcaagaccaaccggaaagtgaccgtgaagcagctgaaagaggactacttcaagaaaatcgagtgcttcgactccgtggaaatctccggcgtggaagatcggttcaacgcctccctgggcacataccacgatctgctgaaaattatcaaggacaaggacttcctggacaatgaggaaaacgaggacattctggaagatatcgtgctgaccctgacactgtttgaggacagagagatgatcgaggaacggctgaaaacctatgcccacctgttcgacgacaaagtgatgaagcagctgaagcggcggagatacaccggctggggcaggctgagccggaagctgatcaacggcatccgggacaagcagtccggcaagacaatcctggatttcctgaagtccgacggcttcgccaacagaaacttcatgcagctgatccacgacgacagcctgacctttaaagaggacatccagaaagcccaggtgtccggccagggcgatagcctgcacgagcacattgccaatctggccggcagccccgccattaagaagggcatcctgcagacagtgaaggtggtggacgagctcgtgaaagtgatgggccggcacaagcccgagaacatcgtgatcgaaatggccagagagaaccagaccacccagaagggacagaagaacagccgcgagagaatgaagcggatcgaagagggcatcaaagagctgggcagccagatcctgaaagaacaccccgtggaaaacacccagctgcagaacgagaagctgtacctgtactacctgcagaatgggcgggatatgtacgtggaccaggaactggacatcaaccggctgtccgactacgatgtggacgctatcgtgcctcagagctttctgaaggacgactccatcgacaacaaggtgctgaccagaagcgacaagaaccggggcaagagcgacaacgtgccctccgaagaggtcgtgaagaagatgaagaactactggcggcagctgctgaacgccaagctgattacccagagaaagttcgacaatctgaccaaggccgagagaggcggcctgagcgaactggataaggccggcttcatcaagagacagctggtggaaacccggcagatcacaaagcacgtggcacagatcctggactcccggatgaacactaagtacgacgagaatgacaagctgatccgggaagtgaaagtgatcaccctgaagtccaagctggtgtccgatttccggaaggatttccagttttacaaagtgcgcgagatcaacaactaccaccacgcccacgacgcctacctgaacgccgtcgtgggaaccgccctgatcaaaaagtaccctaagctggaaagcgagttcgtgtacggcgactacaaggtgtacgacgtgcggaagatgatcgccaagagcgagcaggaaatcggcaaggctaccgccaagtacttcttctacagcaacatcatgaactttttcaagaccgagattaccctggccaacggcgagatccggaagcggcctctgatcgagacaaacggcgaaaccggggagatcgtgtgggataagggccgggattttgccaccgtgcggaaagtgctgagcatgccccaagtgaatatcgtgaaaaagaccgaggtgcagacaggcggcttcagcaaagagtctatcctgcccaagaggaacagcgataagctgatcgccagaaagaaggactgggaccctaagaagtacggcggcttcgacagccccaccgtggcctattctgtgctggtggtggccaaagtggaaaagggcaagtccaagaaactgaagagtgtgaaagagctgctggggatcaccatcatggaaagaagcagcttcgagaagaatcccatcgactttctggaagccaagggctacaaagaagtgaaaaaggacctgatcatcaagctgcctaagtactccctgttcgagctggaaaacggccggaagagaatgctggcctctgccggcgaactgcagaagggaaacgaactggccctgccctccaaatatgtgaacttcctgtacctggccagccactatgagaagctgaagggctcccccgaggataatgagcagaaacagctgtttgtggaacagcacaagcactacctggacgagatcatcgagcagatcagcgagttctccaagagagtgatcctggccgacgctaatctggacaaagtgctgtccgcctacaacaagcaccgggataagcccatcagagagcaggccgagaatatcatccacctgtttaccctgaccaatctgggagcccctgccgccttcaagtactttgacaccaccatcgaccggaagaggtacaccagcaccaaagaggtgctggacgccaccctgatccaccagagcatcaccggcctgtacgagacacggatcgacctgtctcagctgggaggtgactccggcggatctcctgcccccgcccctgcccctgctcccgctccagcccctgcccctgcccccagcggcggcagcaccctgaacatcgaggacgagtacaggctgcacgagaccagcaaggagcccgacgtgagcctgggcagcacctggctgagcgatttccctcaggcttgggccgagaccggcggcatgggcctggccgtgcggcaggcccccctgattatccccctgaaggccaccagcacccccgtgagcatcaagcagtacccaatgtcccaggaggccaggctgggcatcaagcctcacatccagaggctgctggaccagggcatcctggtgccatgccagtccccctggaacacccctctgctgcccgtgaagaagcctggcaccaacgactaccggcccgtgcaggacctgagagaagtgaacaagcgggtggaggacatccacccaaccgtgcccaacccttacaacctgctgtccggcctgccccccagccaccagtggtacaccgtgctggacctgaaggacgccttcttctgcctgagactgcaccccacctctcagcccctgttcgccttcgagtggcgcgaccccgagatgggcatcagcggccagctgacctggaccagactgccacagggctttaagaatagcccaaccctgtttaacgaggccctgcacagggacctggccgacttcaggatccagcaccccgacctgattctgctgcagtacgtggacgacctgctgctggccgctaccagcgagctggactgccagcagggcaccagagccctgctgcagaccctgggcaacctgggctacagagccagcgccaagaaggcccagatctgtcagaagcaggtgaagtatctgggctacctgctgaaggaaggccagagatggctgaccgaggccagaaaggagactgtgatgggccagcccacccccaagacccccaggcagctgcgggagttcctgggcaaggccggcttttgcagactgtttatccctggcttcgccgagatggccgccccactgtaccctctgaccaagcctggcaccctgtttaactggggccccgaccagcagaaggcctaccaggagatcaagcaggccctgctgaccgcccccgccctgggcctgcccgacctgaccaagcctttcgagctgttcgtggacgagaagcagggatacgccaaaggcgtgctgacccagaagctgggcccctggcggaggcccgtggcctacctgagcaaaaaactggaccctgtggccgccggctggcccccatgcctgcggatggtggccgccatcgctgtgctgaccaaggacgccggcaagctgaccatgggccagcccctggtgatcctggcccctcacgccgtggaggctctggtgaagcagcctccagacaggtggctgtccaacgccaggatgacccactaccaggccctgctgctggacaccgaccgggtgcagttcggccctgtggtggccctgaaccccgccaccctgctgcctctgccagaggagggcctgcagcacaactgcctggacatcctggccgaggcccacggcaccaggcccgacctgaccgaccagcccctgcctgacgccgaccacacctggtacaccgacggcagctccctgctgcaggagggccagaggaaggccggcgccgccgtgaccaccgagaccgaggtgatctgggccaaagccctgcctgccggcacctccgcccagcgggccgagctgatcgccctgacccaggccctgaagatggctgagggcaagaagctgaacgtgtacaccgattccagatacgccttcgccaccgcccacatccacggcgagatctacagaagaaggggctggctgacctccgagggcaaggagatcaagaacaaggacgagattctggccctgctgaaggccctgttcctgcctaagagactgagcatcatccactgtcccggccaccagaagggccacagcgccgaggccagaggcaatagaatggccgaccaggccgccagaaaggccgccatcaccgagacccccgacaccagcaccctgctgatcgagaacagcagcccc

SEQ ID NO: 157 - RNA, 6207 nt, synthetic construct
  misc_feature 1..6207: note = Description of Artificial Sequence: Synthetic polynucleotide
  source 1..6207: mol_type = other RNA
gacaagaagtacagcatcggcctggacatcggcaccaactctgtgggctgggccgtgatcaccgacgagtacaaggtgcccagcaagaaattcaaggtgctgggcaacaccgaccggcacagcatcaagaagaacctgatcggagccctgctgttcgacagcggcgaaacagccgaggccacccggctgaagagaaccgccagaagaagatacaccagacggaagaaccggatctgctatctgcaagagatcttcagcaacgagatggccaaggtggacgacagcttcttccacagactggaagagtccttcctggtggaagaggataagaagcacgagcggcaccccatcttcggcaacatcgtggacgaggtggcctaccacgagaagtaccccaccatctaccacctgagaaagaaactggtggacagcaccgacaaggccgacctgcggctgatctatctggccctggcccacatgatcaagttccggggccacttcctgatcgagggcgacctgaaccccgacaacagcgacgtggacaagctgttcatccagctggtgcagacctacaaccagctgttcgaggaaaaccccatcaacgccagcggcgtggacgccaaggccatcctgtctgccagactgagcaagagcagacggctggaaaatctgatcgcccagctgcccggcgagaagaagaatggcctgttcggaaacctgattgccctgagcctgggcctgacccccaacttcaagagcaacttcgacctggccgaggatgccaaactgcagctgagcaaggacacctacgacgacgacctggacaacctgctggcccagatcggcgaccagtacgccgacctgtttctggccgccaagaacctgtccgacgccatcctgctgagcgacatcctgagagtgaacaccgagatcaccaaggcccccctgagcgcctctatgatcaagagatacgacgagcaccaccaggacctgaccctgctgaaagctctcgtgcggcagcagctgcctgagaagtacaaagagattttcttcgaccagagcaagaacggctacgccggctacattgacggcggagccagccaggaagagttctacaagttcatcaagcccatcctggaaaagatggacggcaccgaggaactgctcgtgaagctgaacagagaggacctgctgcggaagcagcggaccttcgacaacggcagcatcccccaccagatccacctgggagagctgcacgccattctgcggcggcaggaagatttttacccattcctgaaggacaaccgggaaaagatcgagaagatcctgaccttccgcatcccctactacgtgggccctctggccaggggaaacagcagattcgcctggatgaccagaaagagcgaggaaaccatcaccccctggaacttcgaggaagtggtggacaagggcgcttccgcccagagcttcatcgagcggatgaccaacttcgataagaacctgcccaacgagaaggtgctgcccaagcacagcctgctgtacgagtacttcaccgtgtataacgagctgaccaaagtgaaatacgtgaccgagggaatgagaaagcccgccttcctgagcggcgagcagaaaaaggccatcgtggacctgctgttcaagaccaaccggaaagtgaccgtgaagcagctgaaagaggactacttcaagaaaatcgagtgcttcgactccgtggaaatctccggcgtggaagatcggttcaacgcctccctgggcacataccacgatctgctgaaaattatcaaggacaaggacttcctggacaatgaggaaaacgaggacattctggaagatatcgtgctgaccctgacactgtttgaggacagagagatgatcgaggaacggctgaaaacctatgcccacctgttcgacgacaaagtgatgaagcagctgaagcggcggagatacaccggctggggcaggctgagccggaagctgatcaacggcatccgggacaagcagtccggcaagacaatcctggatttcctgaagtccgacggcttcgccaacagaaacttcatgcagctgatccacgacgacagcctgacctttaaagaggacatccagaaagcccaggtgtccggccagggcgatagcctgcacgagcacattgccaatctggccggcagccccgccattaagaagggcatcctgcagacagtgaaggtggtggacgagctcgtgaaagtgatgggccggcacaagcccgagaacatcgtgatcgaaatggccagagagaaccagaccacccagaagggacagaagaacagccgcgagagaatgaagcggatcgaagagggcatcaaagagctgggcagccagatcctgaaagaacaccccgtggaaaacacccagctgcagaacgagaagctgtacctgtactacctgcagaatgggcgggatatgtacgtggaccaggaactggacatcaaccggctgtccgactacgatgtggacgctatcgtgcctcagagctttctgaaggacgactccatcgacaacaaggtgctgaccagaagcgacaagaaccggggcaagagcgacaacgtgccctccgaagaggtcgtgaagaagatgaagaactactggcggcagctgctgaacgccaagctgattacccagagaaagttcgacaatctgaccaaggccgagagaggcggcctgagcgaactggataaggccggcttcatcaagagacagctggtggaaacccggcagatcacaaagcacgtggcacagatcctggactcccggatgaacactaagtacgacgagaatgacaagctgatccgggaagtgaaagtgatcaccctgaagtccaagctggtgtccgatttccggaaggatttccagttttacaaagtgcgcgagatcaacaactaccaccacgcccacgacgcctacctgaacgccgtcgtgggaaccgccctgatcaaaaagtaccctaagctggaaagcgagttcgtgtacggcgactacaaggtgtacgacgtgcggaagatgatcgccaagagcgagcaggaaatcggcaaggctaccgccaagtacttcttctacagcaacatcatgaactttttcaagaccgagattaccctggccaacggcgagatccggaagcggcctctgatcgagacaaacggcgaaaccggggagatcgtgtgggataagggccgggattttgccaccgtgcggaaagtgctgagcatgccccaagtgaatatcgtgaaaaagaccgaggtgcagacaggcggcttcagcaaagagtctatcctgcccaagaggaacagcgataagctgatcgccagaaagaaggactgggaccctaagaagtacggcggcttcgacagccccaccgtggcctattctgtgctggtggtggccaaagtggaaaagggcaagtccaagaaactgaagagtgtgaaagagctgctggggatcaccatcatggaaagaagcagcttcgagaagaatcccatcgactttctggaagccaagggctacaaagaagtgaaaaaggacctgatcatcaagctgcctaagtactccctgttcgagctggaaaacggccggaagagaatgctggcctctgccggcgaactgcagaagggaaacgaactggccctgccctccaaatatgtgaacttcctgtacctggccagccactatgagaagctgaagggctcccccgaggataatgagcagaaacagctgtttgtggaacagcacaagcactacctggacgagatcatcgagcagatcagcgagttctccaagagagtgatcctggccgacgctaatctggacaaagtgctgtccgcctacaacaagcaccgggataagcccatcagagagcaggccgagaatatcatccacctgtttaccctgaccaatctgggagcccctgccgccttcaagtactttgacaccaccatcgaccggaagaggtacaccagcaccaaagaggtgctggacgccaccctgatccaccagagcatcaccggcctgtacgagacacggatcgacctgtctcagctgggaggtgactccggcggatctcctgcccccgcccctgcccctgctcccgctccagcccctgcccctgcccccagcggcggcagcaccctgaacatcgaggacgagtacaggctgcacgagaccagcaaggagcccgacgtgagcctgggcagcacctggctgagcgatttccctcaggcttgggccgagaccggcggcatgggcctggccgtgcggcaggcccccctgattatccccctgaaggccaccagcacccccgtgagcatcaagcagtacccaatgtcccaggaggccaggctgggcatcaagcctcacatccagaggctgctggaccagggcatcctggtgccatgccagtccccctggaacacccctctgctgcccgtgaagaagcctggcaccaacgactaccggcccgtgcaggacctgagagaagtgaacaagcgggtggaggacatccacccaaccgtgcccaacccttacaacctgctgtccggcctgccccccagccaccagtggtacaccgtgctggacctgaaggacgccttcttctgcctgagactgcaccccacctctcagcccctgttcgccttcgagtggcgcgaccccgagatgggcatcagcggccagctgacctggaccagactgccacagggctttaagaatagcccaaccctgtttaacgaggccctgcacagggacctggccgacttcaggatccagcaccccgacctgattctgctgcagtacgtggacgacctgctgctggccgctaccagcgagctggactgccagcagggcaccagagccctgctgcagaccctgggcaacctgggctacagagccagcgccaagaaggcccagatctgtcagaagcaggtgaagtatctgggctacctgctgaaggaaggccagagatggctgaccgaggccagaaaggagactgtgatgggccagcccacccccaagacccccaggcagctgcgggagttcctgggcaaggccggcttttgcagactgtttatccctggcttcgccgagatggccgccccactgtaccctctgaccaagcctggcaccctgtttaactggggccccgaccagcagaaggcctaccaggagatcaagcaggccctgctgaccgcccccgccctgggcctgcccgacctgaccaagcctttcgagctgttcgtggacgagaagcagggatacgccaaaggcgtgctgacccagaagctgggcccctggcggaggcccgtggcctacctgagcaaaaaactggaccctgtggccgccggctggcccccatgcctgcggatggtggccgccatcgctgtgctgaccaaggacgccggcaagctgaccatgggccagcccctggtgatcctggcccctcacgccgtggaggctctggtgaagcagcctccagacaggtggctgtccaacgccaggatgacccactaccaggccctgctgctggacaccgaccgggtgcagttcggccctgtggtggccctgaaccccgccaccctgctgcctctgccagaggagggcctgcagcacaactgcctggacatcctggccgaggcccacggcaccaggcccgacctgaccgaccagcccctgcctgacgccgaccacacctggtacaccgacggcagctccctgctgcaggagggccagaggaaggccggcgccgccgtgaccaccgagaccgaggtgatctgggccaaagccctgcctgccggcacctccgcccagcgggccgagctgatcgccctgacccaggccctgaagatggctgagggcaagaagctgaacgtgtacaccgattccagatacgccttcgccaccgcccacatccacggcgagatctacagaagaaggggctggctgacctccgagggcaaggagatcaagaacaaggacgagattctggccctgctgaaggccctgttcctgcctaagagactgagcatcatccactgtcccggccaccagaagggccacagcgccgaggccagaggcaatagaatggccgaccaggccgccagaaaggccgccatcaccgagacccccgacaccagcaccctgctgatcgagaacagcagcccc

SEQ ID NO: 158 - protein, 1896 aa, synthetic construct
  REGION 1..1896: note = Description of Artificial Sequence: Synthetic polypeptide
DKKYSIGLDIGTNSVGWAVITDEYKVPSKKFKVLGNTDRHSIKKNLIGALLFDSGETAEATRLKRTARRRYTRRKNRICYLQEIFSNEMAKVDDSFFHRLEESFLVEEDKKHERHPIFGNIVDEVAYHEKYPTIYHLRKKLVDSTDKADLRLIYLALAHMIKFRGHFLIEGDLNPDNSDVDKLFIQLVQTYNQLFEENPINASGVDAKAILSARLSKSRRLENLIAQLPGEKKNGLFGNLIALSLGLTPNFKSNFDLAEDAKLQLSKDTYDDDLDNLLAQIGDQYADLFLAAKNLSDAILLSDILRVNTEITKAPLSASMIKRYDEHHQDLTLLKALVRQQLPEKYKEIFFDQSKNGYAGYIDGGASQEEFYKFIKPILEKMDGTEELLVKLNREDLLRKQRTFDNGSIPHQIHLGELHAILRRQEDFYPFLKDNREKIEKILTFRIPYYVGPLARGNSRFAWMTRKSEETITPWNFEEVVDKGASAQSFIERMTNFDKNLPNEKVLPKHSLLYEYFTVYNELTKVKYVTEGMRKPAFLSGEQKKAIVDLLFKTNRKVTVKQLKEDYFKKIECFDSVEISGVEDRFNASLGTYHDLLKIIKDKDFLDNEENEDILEDIVLTLTLFEDREMIEERLKTYAHLFDDKVMKQLKRRRYTGWGRLSRKLINGIRDKQSGKTILDFLKSDGFANRNFMQLIHDDSLTFKEDIQKAQVSGQGDSLHEHIANLAGSPAIKKGILQTVKVVDELVKVMGRHKPENIVIEMARENQTTQKGQKNSRERMKRIEEGIKELGSQILKEHPVENTQLQNEKLYLYYLQNGRDMYVDQELDINRLSDYDVDAIVPQSFLKDDSIDNKVLTRSDKNRGKSDNVPSEEVVKKMKNYWRQLLNAKLITQRKFDNLTKAERGGLSELDKAGFIKRQLVETRQITKHVAQILDSRMNTKYDENDKLIREVKVITLKSKLVSDFRKDFQFYKVREINNYHHAHDAYLNAVVGTALIKKYPKLESEFVYGDYKVYDVRKMIAKSEQEIGKATAKYFFYSNIMNFFKTEITLANGEIRKRPLIETNGETGEIVWDKGRDFATVRKVLSMPQVNIVKKTEVQTGGFSKESILPKRNSDKLIARKKDWDPKKYGGFDSPTVAYSVLVVAKVEKGKSKKLKSVKELLGITIMERSSFEKNPIDFLEAKGYKEVKKDLIIKLPKYSLFELENGRKRMLASAGELQKGNELALPSKYVNFLYLASHYEKLKGSPEDNEQKQLFVEQHKHYLDEIIEQISEFSKRVILADANLDKVLSAYNKHRDKPIREQAENIIHLFTLTNLGAPAAFKYFDTTIDRKRYTSTKEVLDATLIHQSITGLYETRIDLSQLGGDSGGSPAPAPAPAPAPAPAPAPSGGSTLNIEDEYRLHETSKEPDVSLGSTWLSDFPQAWAETGGMGLAVRQAPLIIPLKATSTPVSIKQYPMSQEARLGIKPHIQRLLDQGILVPCQSPWNTPLLPVKKPGTNDYRPVQDLREVNKRVEDIHPTVPNPYNLLSGLPPSHQWYTVLDLKDAFFCLRLHPTSQPLFAFEWRDPEMGISGQLTWTRLPQGFKNSPTLFNEALHRDLADFRIQHPDLILLQYVDDLLLAATSELDCQQGTRALLQTLGNLGYRASAKKAQICQKQVKYLGYLLKEGQRWLTEARKETVMGQPTPKTPRQLREFLGKAGFCRLFIPGFAEMAAPLYPLTKPGTLFNWGPDQQKAYQEIKQALLTAPALGLPDLTKPFELFVDEKQGYAKGVLTQKLGPWRRPVAYLSKKLDPVAAGWPPCLRMVAAIAVLTKDAGKLTMGQPLVILAPHAVEALVKQPPDRWLSNARMTHYQALLLDTDRVQFGPVVALNPATLLPLPEEGLQHNCLDILAEAHG

SEQ ID NO: 159 - DNA, 5688 bp, synthetic construct
  misc_feature 1..5688: note = Description of Artificial Sequence: Synthetic polynucleotide
  source 1..5688: mol_type = other DNA
gacaagaagtacagcatcggcctggacatcggcaccaactctgtgggctgggccgtgatcaccgacgagtacaaggtgcccagcaagaaattcaaggtgctgggcaacaccgaccggcacagcatcaagaagaacctgatcggagccctgctgttcgacagcggcgaaacagccgaggccacccggctgaagagaaccgccagaagaagatacaccagacggaagaaccggatctgctatctgcaagagatcttcagcaacgagatggccaaggtggacgacagcttcttccacagactggaagagtccttcctggtggaagaggataagaagcacgagcggcaccccatcttcggcaacatcgtggacgaggtggcctaccacgagaagtaccccaccatctaccacctgagaaagaaactggtggacagcaccgacaaggccgacctgcggctgatctatctggccctggcccacatgatcaagttccggggccacttcctgatcgagggcgacctgaaccccgacaacagcgacgtggacaagctgttcatccagctggtgcagacctacaaccagctgttcgaggaaaaccccatcaacgccagcggcgtggacgccaaggccatcctgtctgccagactgagcaagagcagacggctggaaaatctgatcgcccagctgcccggcgagaagaagaatggcctgttcggaaacctgattgccctgagcctgggcctgacccccaacttcaagagcaacttcgacctggccgaggatgccaaactgcagctgagcaaggacacctacgacgacgacctggacaacctgctggcccagatcggcgaccagtacgccgacctgtttctggccgccaagaacctgtccgacgccatcctgctgagcgacatcctgagagtgaacaccgagatcaccaaggcccccctgagcgcctctatgatcaagagatacgacgagcaccaccaggacctgaccctgctgaaagctctcgtgcggcagcagctgcctgagaagtacaaagagattttcttcgaccagagcaagaacggctacgccggctacattgacggcggagccagccaggaagagttctacaagttcatcaagcccatcctggaaaagatggacggcaccgaggaactgctcgtgaagctgaacagagaggacctgctgcggaagcagcggaccttcgacaacggcagcatcccccaccagatccacctgggagagctgcacgccattctgcggcggcaggaagatttttacccattcctgaaggacaaccgggaaaagatcgagaagatcctgaccttccgcatcccctactacgtgggccctctggccaggggaaacagcagattcgcctggatgaccagaaagagcgaggaaaccatcaccccctggaacttcgaggaagtggtggacaagggcgcttccgcccagagcttcatcgagcggatgaccaacttcgataagaacctgcccaacgagaaggtgctgcccaagcacagcctgctgtacgagtacttcaccgtgtataacgagctgaccaaagtgaaatacgtgaccgagggaatgagaaagcccgccttcctgagcggcgagcagaaaaaggccatcgtggacctgctgttcaagaccaaccggaaagtgaccgtgaagcagctgaaagaggactacttcaagaaaatcgagtgcttcgactccgtggaaatctccggcgtggaagatcggttcaacgcctccctgggcacataccacgatctgctgaaaattatcaaggacaaggacttcctggacaatgaggaaaacgaggacattctggaagatatcgtgctgaccctgacactgtttgaggacagagagatgatcgaggaacggctgaaaacctatgcccacctgttcgacgacaaagtgatgaagcagctgaagcggcggagatacaccggctggggcaggctgagccggaagctgatcaacggcatccgggacaagcagtccggcaagacaatcctggatttcctgaagtccgacggcttcgccaacagaaacttcatgcagctgatccacgacgacagcctgacctttaaagaggacatccagaaagcccaggtgtccggccagggcgatagcctgcacgagcacattgccaatctggccggcagccccgccattaagaagggcatcctgcagacagtgaaggtggtggacgagctcgtgaaagtgatgggccggcacaagcccgagaacatcgtgatcgaaatggccagagagaaccagaccacccagaagggacagaagaacagccgcgagagaatgaagcggatcgaagagggcatcaaagagctgggcagccagatcctgaaagaacaccccgtggaaaacacccagctgcagaacgagaagctgtacctgtactacctgcagaatgggcgggatatgtacgtggaccaggaactggacatcaaccggctgtccgactacgatgtggacgctatcgtgcctcagagctttctgaaggacgactccatcgacaacaaggtgctgaccagaagcgacaagaaccggggcaagagcgacaacgtgccctccgaagaggtcgtgaagaagatgaagaactactggcggcagctgctgaacgccaagctgattacccagagaaagttcgacaatctgaccaaggccgagagaggcggcctgagcgaactggataaggccggcttcatcaagagacagctggtggaaacccggcagatcacaaagcacgtggcacagatcctggactcccggatgaacactaagtacgacgagaatgacaagctgatccgggaagtgaaagtgatcaccctgaagtccaagctggtgtccgatttccggaaggatttccagttttacaaagtgcgcgagatcaacaactaccaccacgcccacgacgcctacctgaacgccgtcgtgggaaccgccctgatcaaaaagtaccctaagctggaaagcgagttcgtgtacggcgactacaaggtgtacgacgtgcggaagatgatcgccaagagcgagcaggaaatcggcaaggctaccgccaagtacttcttctacagcaacatcatgaactttttcaagaccgagattaccctggccaacggcgagatccggaagcggcctctgatcgagacaaacggcgaaaccggggagatcgtgtgggataagggccgggattttgccaccgtgcggaaagtgctgagcatgccccaagtgaatatcgtgaaaaagaccgaggtgcagacaggcggcttcagcaaagagtctatcctgcccaagaggaacagcgataagctgatcgccagaaagaaggactgggaccctaagaagtacggcggcttcgacagccccaccgtggcctattctgtgctggtggtggccaaagtggaaaagggcaagtccaagaaactgaagagtgtgaaagagctgctggggatcaccatcatggaaagaagcagcttcgagaagaatcccatcgactttctggaagccaagggctacaaagaagtgaaaaaggacctgatcatcaagctgcctaagtactccctgttcgagctggaaaacggccggaagagaatgctggcctctgccggcgaactgcagaagggaaacgaactggccctgccctccaaatatgtgaacttcctgtacctggccagccactatgagaagctgaagggctcccccgaggataatgagcagaaacagctgtttgtggaacagcacaagcactacctggacgagatcatcgagcagatcagcgagttctccaagagagtgatcctggccgacgctaatctggacaaagtgctgtccgcctacaacaagcaccgggataagcccatcagagagcaggccgagaatatcatccacctgtttaccctgaccaatctgggagcccctgccgccttcaagtactttgacaccaccatcgaccggaagaggtacaccagcaccaaagaggtgctggacgccaccctgatccaccagagcatcaccggcctgtacgagacacggatcgacctgtctcagctgggaggtgactccggcggatctcctgcccccgcccctgcccctgctcccgctccagcccctgcccctgcccccagcggcggcagcaccctgaacatcgaggacgagtacaggctgcacgagaccagcaaggagcccgacgtgagcctgggcagcacctggctgagcgatttccctcaggcttgggccgagaccggcggcatgggcctggccgtgcggcaggcccccctgattatccccctgaaggccaccagcacccccgtgagcatcaagcagtacccaatgtcccaggaggccaggctgggcatcaagcctcacatccagaggctgctggaccagggcatcctggtgccatgccagtccccctggaacacccctctgctgcccgtgaagaagcctggcaccaacgactaccggcccgtgcaggacctgagagaagtgaacaagcgggtggaggacatccacccaaccgtgcccaacccttacaacctgctgtccggcctgccccccagccaccagtggtacaccgtgctggacctgaaggacgccttcttctgcctgagactgcaccccacctctcagcccctgttcgccttcgagtggcgcgaccccgagatgggcatcagcggccagctgacctggaccagactgccacagggctttaagaatagcccaaccctgtttaacgaggccctgcacagggacctggccgacttcaggatccagcaccccgacctgattctgctgcagtacgtggacgacctgctgctggccgctaccagcgagctggactgccagcagggcaccagagccctgctgcagaccctgggcaacctgggctacagagccagcgccaagaaggcccagatctgtcagaagcaggtgaagtatctgggctacctgctgaaggaaggccagagatggctgaccgaggccagaaaggagactgtgatgggccagcccacccccaagacccccaggcagctgcgggagttcctgggcaaggccggcttttgcagactgtttatccctggcttcgccgagatggccgccccactgtaccctctgaccaagcctggcaccctgtttaactggggccccgaccagcagaaggcctaccaggagatcaagcaggccctgctgaccgcccccgccctgggcctgcccgacctgaccaagcctttcgagctgttcgtggacgagaagcagggatacgccaaaggcgtgctgacccagaagctgggcccctggcggaggcccgtggcctacctgagcaaaaaactggaccctgtggccgccggctggcccccatgcctgcggatggtggccgccatcgctgtgctgaccaaggacgccggcaagctgaccatgggccagcccctggtgatcctggcccctcacgccgtggaggctctggtgaagcagcctccagacaggtggctgtccaacgccaggatgacccactaccaggccctgctgctggacaccgaccgggtgcagttcggccctgtggtggccctgaaccccgccaccctgctgcctctgccagaggagggcctgcagcacaactgcctggacatcctggccgaggcccacggc

SEQ ID NO: 160 - RNA, 5688 nt, synthetic construct
  misc_feature 1..5688: note = Description of Artificial Sequence: Synthetic polynucleotide
  source 1..5688: mol_type = other RNA
gacaagaagtacagcatcggcctggacatcggcaccaactctgtgggctgggccgtgatcaccgacgagtacaaggtgcccagcaagaaattcaaggtgctgggcaacaccgaccggcacagcatcaagaagaacctgatcggagccctgctgttcgacagcggcgaaacagccgaggccacccggctgaagagaaccgccagaagaagatacaccagacggaagaaccggatctgctatctgcaagagatcttcagcaacgagatggccaaggtggacgacagcttcttccacagactggaagagtccttcctggtggaagaggataagaagcacgagcggcaccccatcttcggcaacatcgtggacgaggtggcctaccacgagaagtaccccaccatctaccacctgagaaagaaactggtggacagcaccgacaaggccgacctgcggctgatctatctggccctggcccacatgatcaagttccggggccacttcctgatcgagggcgacctgaaccccgacaacagcgacgtggacaagctgttcatccagctggtgcagacctacaaccagctgttcgaggaaaaccccatcaacgccagcggcgtggacgccaaggccatcctgtctgccagactgagcaagagcagacggctggaaaatctgatcgcccagctgcccggcgagaagaagaatggcctgttcggaaacctgattgccctgagcctgggcctgacccccaacttcaagagcaacttcgacctggccgaggatgccaaactgcagctgagcaaggacacctacgacgacgacctggacaacctgctggcccagatcggcgaccagtacgccgacctgtttctggccgccaagaacctgtccgacgccatcctgctgagcgacatcctgagagtgaacaccgagatcaccaaggcccccctgagcgcctctatgatcaagagatacgacgagcaccaccaggacctgaccctgctgaaagctctcgtgcggcagcagctgcctgagaagtacaaagagattttcttcgaccagagcaagaacggctacgccggctacattgacggcggagccagccaggaagagttctacaagttcatcaagcccatcctggaaaagatggacggcaccgaggaactgctcgtgaagctgaacagagaggacctgctgcggaagcagcggaccttcgacaacggcagcatcccccaccagatccacctgggagagctgcacgccattctgcggcggcaggaagatttttacccattcctgaaggacaaccgggaaaagatcgagaagatcctgaccttccgcatcccctactacgtgggccctctggccaggggaaacagcagattcgcctggatgaccagaaagagcgaggaaaccatcaccccctggaacttcgaggaagtggtggacaagggcgcttccgcccagagcttcatcgagcggatgaccaacttcgataagaacctgcccaacgagaaggtgctgcccaagcacagcctgctgtacgagtacttcaccgtgtataacgagctgaccaaagtgaaatacgtgaccgagggaatgagaaagcccgccttcctgagcggcgagcagaaaaaggccatcgtggacctgctgttcaagaccaaccggaaagtgaccgtgaagcagctgaaagaggactacttcaagaaaatcgagtgcttcgactccgtggaaatctccggcgtggaagatcggttcaacgcctccctgggcacataccacgatctgctgaaaattatcaaggacaaggacttcctggacaatgaggaaaacgaggacattctggaagatatcgtgctgaccctgacactgtttgaggacagagagatgatcgaggaacggctgaaaacctatgcccacctgttcgacgacaaagtgatgaagcagctgaagcggcggagatacaccggctggggcaggctgagccggaagctgatcaacggcatccgggacaagcagtccggcaagacaatcctggatttcctgaagtccgacggcttcgccaacagaaacttcatgcagctgatccacgacgacagcctgacctttaaagaggacatccagaaagcccaggtgtccggccagggcgatagcctgcacgagcacattgccaatctggccggcagccccgccattaagaagggcatcctgcagacagtgaaggtggtggacgagctcgtgaaagtgatgggccggcacaagcccgagaacatcgtgatcgaaatggccagagagaaccagaccacccagaagggacagaagaacagccgcgagagaatgaagcggatcgaagagggcatcaaagagctgggcagccagatcctgaaagaacaccccgtggaaaacacccagctgcagaacgagaagctgtacctgtactacctgcagaatgggcgggatatgtacgtggaccaggaactggacatcaaccggctgtccgactacgatgtggacgctatcgtgcctcagagctttctgaaggacgactccatcgacaacaaggtgctgaccagaagcgacaagaaccggggcaagagcgacaacgtgccctccgaagaggtcgtgaagaagatgaagaactactggcggcagctgctgaacgccaagctgattacccagagaaagttcgacaatctgaccaaggccgagagaggcggcctgagcgaactggataaggccggcttcatcaagagacagctggtggaaacccggcagatcacaaagcacgtggcacagatcctggactcccggatgaacactaagtacgacgagaatgacaagctgatccgggaagtgaaagtgatcaccctgaagtccaagctggtgtccgatttccggaaggatttccagttttacaaagtgcgcgagatcaacaactaccaccacgcccacgacgcctacctgaacgccgtcgtgggaaccgccctgatcaaaaagtaccctaagctggaaagcgagttcgtgtacggcgactacaaggtgtacgacgtgcggaagatgatcgccaagagcgagcaggaaatcggcaaggctaccgccaagtacttcttctacagcaacatcatgaactttttcaagaccgagattaccctggccaacggcgagatccggaagcggcctctgatcgagacaaacggcgaaaccggggagatcgtgtgggataagggccgggattttgccaccgtgcggaaagtgctgagcatgccccaagtgaatatcgtgaaaaagaccgaggtgcagacaggcggcttcagcaaagagtctatcctgcccaagaggaacagcgataagctgatcgccagaaagaaggactgggaccctaagaagtacggcggcttcgacagccccaccgtggcctattctgtgctggtggtggccaaagtggaaaagggcaagtccaagaaactgaagagtgtgaaagagctgctggggatcaccatcatggaaagaagcagcttcgagaagaatcccatcgactttctggaagccaagggctacaaagaagtgaaaaaggacctgatcatcaagctgcctaagtactccctgttcgagctggaaaacggccggaagagaatgctggcctctgccggcgaactgcagaagggaaacgaactggccctgccctccaaatatgtgaacttcctgtacctggccagccactatgagaagctgaagggctcccccgaggataatgagcagaaacagctgtttgtggaacagcacaagcactacctggacgagatcatcgagcagatcagcgagttctccaagagagtgatcctggccgacgctaatctggacaaagtgctgtccgcctacaacaagcaccgggataagcccatcagagagcaggccgagaatatcatccacctgtttaccctgaccaatctgggagcccctgccgccttcaagtactttgacaccaccatcgaccggaagaggtacaccagcaccaaagaggtgctggacgccaccctgatccaccagagcatcaccggcctgtacgagacacggatcgacctgtctcagctgggaggtgactccggcggatctcctgcccccgcccctgcccctgctcccgctccagcccctgcccctgcccccagcggcggcagcaccctgaacatcgaggacgagtacaggctgcacgagaccagcaaggagcccgacgtgagcctgggcagcacctggctgagcgatttccctcaggcttgggccgagaccggcggcatgggcctggccgtgcggcaggcccccctgattatccccctgaaggccaccagcacccccgtgagcatcaagcagtacccaatgtcccaggaggccaggctgggcatcaagcctcacatccagaggctgctggaccagggcatcctggtgccatgccagtccccctggaacacccctctgctgcccgtgaagaagcctggcaccaacgactaccggcccgtgcaggacctgagagaagtgaacaagcgggtggaggacatccacccaaccgtgcccaacccttacaacctgctgtccggcctgccccccagccaccagtggtacaccgtgctggacctgaaggacgccttcttctgcctgagactgcaccccacctctcagcccctgttcgccttcgagtggcgcgaccccgagatgggcatcagcggccagctgacctggaccagactgccacagggctttaagaatagcccaaccctgtttaacgaggccctgcacagggacctggccgacttcaggatccagcaccccgacctgattctgctgcagtacgtggacgacctgctgctggccgctaccagcgagctggactgccagcagggcaccagagccctgctgcagaccctgggcaacctgggctacagagccagcgccaagaaggcccagatctgtcagaagcaggtgaagtatctgggctacctgctgaaggaaggccagagatggctgaccgaggccagaaaggagactgtgatgggccagcccacccccaagacccccaggcagctgcgggagttcctgggcaaggccggcttttgcagactgtttatccctggcttcgccgagatggccgccccactgtaccctctgaccaagcctggcaccctgtttaactggggccccgaccagcagaaggcctaccaggagatcaagcaggccctgctgaccgcccccgccctgggcctgcccgacctgaccaagcctttcgagctgttcgtggacgagaagcagggatacgccaaaggcgtgctgacccagaagctgggcccctggcggaggcccgtggcctacctgagcaaaaaactggaccctgtggccgccggctggcccccatgcctgcggatggtggccgccatcgctgtgctgaccaaggacgccggcaagctgaccatgggccagcccctggtgatcctggcccctcacgccgtggaggctctggtgaagcagcctccagacaggtggctgtccaacgccaggatgacccactaccaggccctgctgctggacaccgaccgggtgcagttcggccctgtggtggccctgaaccccgccaccctgctgcctctgccagaggagggcctgcagcacaactgcctggacatcctggccgaggcccacggc

SEQ ID NO: 161 - protein, 2077 aa, synthetic construct
  REGION 1..2077: note = Description of Artificial Sequence: Synthetic polypeptide
DKKYSIGLDIGTNSVGWAVITDEYKVPSKKFKVLGNTDRHSIKKNLIGALLFDSGETAEATRLKRTARRRYTRRKNRICYLQEIFSNEMAKVDDSFFHRLEESFLVEEDKKHERHPIFGNIVDEVAYHEKYPTIYHLRKKLVDSTDKADLRLIYLALAHMIKFRGHFLIEGDLNPDNSDVDKLFIQLVQTYNQLFEENPINASGVDAKAILSARLSKSRRLENLIAQLPGEKKNGLFGNLIALSLGLTPNFKSNFDLAEDAKLQLSKDTYDDDLDNLLAQIGDQYADLFLAAKNLSDAILLSDILRVNTEITKAPLSASMIKRYDEHHQDLTLLKALVRQQLPEKYKEIFFDQSKNGYAGYIDGGASQEEFYKFIKPILEKMDGTEELLVKLNREDLLRKQRTFDNGSIPHQIHLGELHAILRRQEDFYPFLKDNREKIEKILTFRIPYYVGPLARGNSRFAWMTRKSEETITPWNFEEVVDKGASAQSFIERMTNFDKNLPNEKVLPKHSLLYEYFTVYNELTKVKYVTEGMRKPAFLSGEQKKAIVDLLFKTNRKVTVKQLKEDYFKKIECFDSVEISGVEDRFNASLGTYHDLLKIIKDKDFLDNEENEDILEDIVLTLTLFEDREMIEERLKTYAHLFDDKVMKQLKRRRYTGWGRLSRKLINGIRDKQSGKTILDFLKSDGFANRNFMQLIHDDSLTFKEDIQKAQVSGQGDSLHEHIANLAGSPAIKKGILQTVKVVDELVKVMGRHKPENIVIEMARENQTTQKGQKNSRERMKRIEEGIKELGSQILKEHPVENTQLQNEKLYLYYLQNGRDMYVDQELDINRLSDYDVDAIVPQSFLKDDSIDNKVLTRSDKNRGKSDNVPSEEVVKKMKNYWRQLLNAKLITQRKFDNLTKAERGGLSELDKAGFIKRQLVETRQITKHVAQILDSRMNTKYDENDKLIREVKVITLKSKLVSDFRKDFQFYKVREINNYHHAHDAYLNAVVGTALIKKYPKLESEFVYGDYKVYDVRKMIAKSEQEIGKATAKYFFYSNIMNFFKTEITLANGEIRKRPLIETNGETGEIVWDKGRDFATVRKVLSMPQVNIVKKTEVQTGGFSKESILPKRNSDKLIARKKDWDPKKYGGFDSPTVAYSVLVVAKVEKGKSKKLKSVKELLGITIMERSSFEKNPIDFLEAKGYKEVKKDLIIKLPKYSLFELENGRKRMLASAGELQKGNELALPSKYVNFLYLASHYEKLKGSPEDNEQKQLFVEQHKHYLDEIIEQISEFSKRVILADANLDKVLSAYNKHRDKPIREQAENIIHLFTLTNLGAPAAFKYFDTTIDRKRYTSTKEVLDATLIHQSITGLYETRIDLSQLGGDSGGSPAPAPAPAPAPAPAPAPAPAPAPAPSGGSTLNIEDEYRLHETSKEPDVSLGSTWLSDFPQAWAETGGMGLAVRQAPLIIPLKATSTPVSIKQYPMSQEARLGIKPHIQRLLDQGILVPCQSPWNTPLLPVKKPGTNDYRPVQDLREVNKRVEDIHPTVPNPYNLLSGLPPSHQWYTVLDLKDAFFCLRLHPTSQPLFAFEWRDPEMGISGQLTWTRLPQGFKNSPTLFNEALHRDLADFRIQHPDLILLQYVDDLLLAATSELDCQQGTRALLQTLGNLGYRASAKKAQICQKQVKYLGYLLKEGQRWLTEARKETVMGQPTPKTPRQLREFLGKAGFCRLFIPGFAEMAAPLYPLTKPGTLFNWGPDQQKAYQEIKQALLTAPALGLPDLTKPFELFVDEKQGYAKGVLTQKLGPWRRPVAYLSKKLDPVAAGWPPCLRMVAAIAVLTKDAGKLTMGQPLVILAPHAVEALVKQPPDRWLSNARMTHYQALLLDTDRVQFGPVVALNPATLLPLPEEGLQHNCLDILAEAHGTRPDLTDQPLPDADHTWYTDGSSLLQEGQRKAGAAVTTETEVIWAKALPAGTSAQRAELIALTQALKMAEGKKLNVYTDSRYAFATAHIHGEIYRRRGWLTSEGKEIKNKDEILALLKALFLPKRLSIIHCPGHQKGHSAEARGNRMADQAARKAAITETPDTSTLLIENSSP

SEQ ID NO: 162 - DNA, 6231 bp, synthetic construct
  misc_feature 1..6231: note = Description of Artificial Sequence: Synthetic polynucleotide
  source 1..6231: mol_type = other DNA
gacaagaagtacagcatcggcctggacatcggcaccaactctgtgggctgggccgtgatcaccgacgagtacaaggtgcccagcaagaaattcaaggtgctgggcaacaccgaccggcacagcatcaagaagaacctgatcggagccctgctgttcgacagcggcgaaacagccgaggccacccggctgaagagaaccgccagaagaagatacaccagacggaagaaccggatctgctatctgcaagagatcttcagcaacgagatggccaaggtggacgacagcttcttccacagactggaagagtccttcctggtggaagaggataagaagcacgagcggcaccccatcttcggcaacatcgtggacgaggtggcctaccacgagaagtaccccaccatctaccacctgagaaagaaactggtggacagcaccgacaaggccgacctgcggctgatctatctggccctggcccacatgatcaagttccggggccacttcctgatcgagggcgacctgaaccccgacaacagcgacgtggacaagctgttcatccagctggtgcagacctacaaccagctgttcgaggaaaaccccatcaacgccagcggcgtggacgccaaggccatcctgtctgccagactgagcaagagcagacggctggaaaatctgatcgcccagctgcccggcgagaagaagaatggcctgttcggaaacctgattgccctgagcctgggcctgacccccaacttcaagagcaacttcgacctggccgaggatgccaaactgcagctgagcaaggacacctacgacgacgacctggacaacctgctggcccagatcggcgaccagtacgccgacctgtttctggccgccaagaacctgtccgacgccatcctgctgagcgacatcctgagagtgaacaccgagatcaccaaggcccccctgagcgcctctatgatcaagagatacgacgagcaccaccaggacctgaccctgctgaaagctctcgtgcggcagcagctgcctgagaagtacaaagagattttcttcgaccagagcaagaacggctacgccggctacattgacggcggagccagccaggaagagttctacaagttcatcaagcccatcctggaaaagatggacggcaccgaggaactgctcgtgaagctgaacagagaggacctgctgcggaagcagcggaccttcgacaacggcagcatcccccaccagatccacctgggagagctgcacgccattctgcggcggcaggaagatttttacccattcctgaaggacaaccgggaaaagatcgagaagatcctgaccttccgcatcccctactacgtgggccctctggccaggggaaacagcagattcgcctggatgaccagaaagagcgaggaaaccatcaccccctggaacttcgaggaagtggtggacaagggcgcttccgcccagagcttcatcgagcggatgaccaacttcgataagaacctgcccaacgagaaggtgctgcccaagcacagcctgctgtacgagtacttcaccgtgtataacgagctgaccaaagtgaaatacgtgaccgagggaatgagaaagcccgccttcctgagcggcgagcagaaaaaggccatcgtggacctgctgttcaagaccaaccggaaagtgaccgtgaagcagctgaaagaggactacttcaagaaaatcgagtgcttcgactccgtggaaatctccggcgtggaagatcggttcaacgcctccctgggcacataccacgatctgctgaaaattatcaaggacaaggacttcctggacaatgaggaaaacgaggacattctggaagatatcgtgctgaccctgacactgtttgaggacagagagatgatcgaggaacggctgaaaacctatgcccacctgttcgacgacaaagtgatgaagcagctgaagcggcggagatacaccggctggggcaggctgagccggaagctgatcaacggcatccgggacaagcagtccggcaagacaatcctggatttcctgaagtccgacggcttcgccaacagaaacttcatgcagctgatccacgacgacagcctgacctttaaagaggacatccagaaagcccaggtgtccggccagggcgatagcctgcacgagcacattgccaatctggccggcagccccgccattaagaagggcatcctgcagacagtgaaggtggtggacgagctcgtgaaagtgatgggccggcacaagcccgagaacatcgtgatcgaaatggccagagagaaccagaccacccagaagggacagaagaacagccgcgagagaatgaagcggatcgaagagggcatcaaagagctgggcagccagatcctgaaagaacaccccgtggaaaacacccagctgcagaacgagaagctgtacctgtactacctgcagaatgggcgggatatgtacgtggaccaggaactggacatcaaccggctgtccgactacgatgtggacgctatcgtgcctcagagctttctgaaggacgactccatcgacaacaaggtgctgaccagaagcgacaagaaccggggcaagagcgacaacgtgccctccgaagaggtcgtgaagaagatgaagaactactggcggcagctgctgaacgccaagctgattacccagagaaagttcgacaatctgaccaaggccgagagaggcggcctgagcgaactggataaggccggcttcatcaagagacagctggtggaaacccggcagatcacaaagcacgtggcacagatcctggactcccggatgaacactaagtacgacgagaatgacaagctgatccgggaagtgaaagtgatcaccctgaagtccaagctggtgtccgatttccggaaggatttccagttttacaaagtgcgcgagatcaacaactaccaccacgcccacgacgcctacctgaacgccgtcgtgggaaccgccctgatcaaaaagtaccctaagctggaaagcgagttcgtgtacggcgactacaaggtgtacgacgtgcggaagatgatcgccaagagcgagcaggaaatcggcaaggctaccgccaagtacttcttctacagcaacatcatgaactttttcaagaccgagattaccctggccaacggcgagatccggaagcggcctctgatcgagacaaacggcgaaaccggggagatcgtgtgggataagggccgggattttgccaccgtgcggaaagtgctgagcatgccccaagtgaatatcgtgaaaaagaccgaggtgcagacaggcggcttcagcaaagagtctatcctgcccaagaggaacagcgataagctgatcgccagaaagaaggactgggaccctaagaagtacggcggcttcgacagccccaccgtggcctattctgtgctggtggtggccaaagtggaaaagggcaagtccaagaaactgaagagtgtgaaagagctgctggggatcaccatcatggaaagaagcagcttcgagaagaatcccatcgactttctggaagccaagggctacaaagaagtgaaaaaggacctgatcatcaagctgcctaagtactccctgttcgagctggaaaacggccggaagagaatgctggcctctgccggcgaactgcagaagggaaacgaactggccctgccctccaaatatgtgaacttcctgtacctggccagccactatgagaagctgaagggctcccccgaggataatgagcagaaacagctgtttgtggaacagcacaagcactacctggacgagatcatcgagcagatcagcgagttctccaagagagtgatcctggccgacgctaatctggacaaagtgctgtccgcctacaacaagcaccgggataagcccatcagagagcaggccgagaatatcatccacctgtttaccctgaccaatctgggagcccctgccgccttcaagtactttgacaccaccatcgaccggaagaggtacaccagcaccaaagaggtgctggacgccaccctgatccaccagagcatcaccggcctgtacgagacacggatcgacctgtctcagctgggaggtgactccggcggcagccccgcccctgcccctgcccctgcccctgcccctgctcccgccccagcccctgctccagcccctgctcccgcccccagcggcggatctaccctgaacatcgaggacgagtacaggctgcacgagaccagcaaggagcccgacgtgagcctgggcagcacctggctgagcgatttccctcaggcttgggccgagaccggcggcatgggcctggccgtgcggcaggcccccctgattatccccctgaaggccaccagcacccccgtgagcatcaagcagtacccaatgtcccaggaggccaggctgggcatcaagcctcacatccagaggctgctggaccagggcatcctggtgccatgccagtccccctggaacacccctctgctgcccgtgaagaagcctggcaccaacgactaccggcccgtgcaggacctgagagaagtgaacaagcgggtggaggacatccacccaaccgtgcccaacccttacaacctgctgtccggcctgccccccagccaccagtggtacaccgtgctggacctgaaggacgccttcttctgcctgagactgcaccccacctctcagcccctgttcgccttcgagtggcgcgaccccgagatgggcatcagcggccagctgacctggaccagactgccacagggctttaagaatagcccaaccctgtttaacgaggccctgcacagggacctggccgacttcaggatccagcaccccgacctgattctgctgcagtacgtggacgacctgctgctggccgctaccagcgagctggactgccagcagggcaccagagccctgctgcagaccctgggcaacctgggctacagagccagcgccaagaaggcccagatctgtcagaagcaggtgaagtatctgggctacctgctgaaggaaggccagagatggctgaccgaggccagaaaggagactgtgatgggccagcccacccccaagacccccaggcagctgcgggagttcctgggcaaggccggcttttgcagactgtttatccctggcttcgccgagatggccgccccactgtaccctctgaccaagcctggcaccctgtttaactggggccccgaccagcagaaggcctaccaggagatcaagcaggccctgctgaccgcccccgccctgggcctgcccgacctgaccaagcctttcgagctgttcgtggacgagaagcagggatacgccaaaggcgtgctgacccagaagctgggcccctggcggaggcccgtggcctacctgagcaaaaaactggaccctgtggccgccggctggcccccatgcctgcggatggtggccgccatcgctgtgctgaccaaggacgccggcaagctgaccatgggccagcccctggtgatcctggcccctcacgccgtggaggctctggtgaagcagcctccagacaggtggctgtccaacgccaggatgacccactaccaggccctgctgctggacaccgaccgggtgcagttcggccctgtggtggccctgaaccccgccaccctgctgcctctgccagaggagggcctgcagcacaactgcctggacatcctggccgaggcccacggcaccaggcccgacctgaccgaccagcccctgcctgacgccgaccacacctggtacaccgacggcagctccctgctgcaggagggccagaggaaggccggcgccgccgtgaccaccgagaccgaggtgatctgggccaaagccctgcctgccggcacctccgcccagcgggccgagctgatcgccctgacccaggccctgaagatggctgagggcaagaagctgaacgtgtacaccgattccagatacgccttcgccaccgcccacatccacggcgagatctacagaagaaggggctggctgacctccgagggcaaggagatcaagaacaaggacgagattctggccctgctgaaggccctgttcctgcctaagagactgagcatcatccactgtcccggccaccagaagggccacagcgccgaggccagaggcaatagaatggccgaccaggccgccagaaaggccgccatcaccgagacccccgacaccagcaccctgctgatcgagaacagcagcccc

SEQ ID NO: 163 - RNA, 6231 nt, synthetic construct
  misc_feature 1..6231: note = Description of Artificial Sequence: Synthetic polynucleotide
  source 1..6231: mol_type = other RNA
gacaagaagtacagcatcggcctggacatcggcaccaactctgtgggctgggccgtgatcaccgacgagtacaaggtgcccagcaagaaattcaaggtgctgggcaacaccgaccggcacagcatcaagaagaacctgatcggagccctgctgttcgacagcggcgaaacagccgaggccacccggctgaagagaaccgccagaagaagatacaccagacggaagaaccggatctgctatctgcaagagatcttcagcaacgagatggccaaggtggacgacagcttcttccacagactggaagagtccttcctggtggaagaggataagaagcacgagcggcaccccatcttcggcaacatcgtggacgaggtggcctaccacgagaagtaccccaccatctaccacctgagaaagaaactggtggacagcaccgacaaggccgacctgcggctgatctatctggccctggcccacatgatcaagttccggggccacttcctgatcgagggcgacctgaaccccgacaacagcgacgtggacaagctgttcatccagctggtgcagacctacaaccagctgttcgaggaaaaccccatcaacgccagcggcgtggacgccaaggccatcctgtctgccagactgagcaagagcagacggctggaaaatctgatcgcccagctgcccggcgagaagaagaatggcctgttcggaaacctgattgccctgagcctgggcctgacccccaacttcaagagcaacttcgacctggccgaggatgccaaactgcagctgagcaaggacacctacgacgacgacctggacaacctgctggcccagatcggcgaccagtacgccgacctgtttctggccgccaagaacctgtccgacgccatcctgctgagcgacatcctgagagtgaacaccgagatcaccaaggcccccctgagcgcctctatgatcaagagatacgacgagcaccaccaggacctgaccctgctgaaagctctcgtgcggcagcagctgcctgagaagtacaaagagattttcttcgaccagagcaagaacggctacgccggctacattgacggcggagccagccaggaagagttctacaagttcatcaagcccatcctggaaaagatggacggcaccgaggaactgctcgtgaagctgaacagagaggacctgctgcggaagcagcggaccttcgacaacggcagcatcccccaccagatccacctgggagagctgcacgccattctgcggcggcaggaagatttttacccattcctgaaggacaaccgggaaaagatcgagaagatcctgaccttccgcatcccctactacgtgggccctctggccaggggaaacagcagattcgcctggatgaccagaaagagcgaggaaaccatcaccccctggaacttcgaggaagtggtggacaagggcgcttccgcccagagcttcatcgagcggatgaccaacttcgataagaacctgcccaacgagaaggtgctgcccaagcacagcctgctgtacgagtacttcaccgtgtataacgagctgaccaaagtgaaatacgtgaccgagggaatgagaaagcccgccttcctgagcggcgagcagaaaaaggccatcgtggacctgctgttcaagaccaaccggaaagtgaccgtgaagcagctgaaagaggactacttcaagaaaatcgagtgcttcgactccgtggaaatctccggcgtggaagatcggttcaacgcctccctgggcacataccacgatctgctgaaaattatcaaggacaaggacttcctggacaatgaggaaaacgaggacattctggaagatatcgtgctgaccctgacactgtttgaggacagagagatgatcgaggaacggctgaaaacctatgcccacctgttcgacgacaaagtgatgaagcagctgaagcggcggagatacaccggctggggcaggctgagccggaagctgatcaacggcatccgggacaagcagtccggcaagacaatcctggatttcctgaagtccgacggcttcgccaacagaaacttcatgcagctgatccacgacgacagcctgacctttaaagaggacatccagaaagcccaggtgtccggccagggcgatagcctgcacgagcacattgccaatctggccggcagccccgccattaagaagggcatcctgcagacagtgaaggtggtggacgagctcgtgaaagtgatgggccggcacaagcccgagaacatcgtgatcgaaatggccagagagaaccagaccacccagaagggacagaagaacagccgcgagagaatgaagcggatcgaagagggcatcaaagagctgggcagccagatcctgaaagaacaccccgtggaaaacacccagctgcagaacgagaagctgtacctgtactacctgcagaatgggcgggatatgtacgtggaccaggaactggacatcaaccggctgtccgactacgatgtggacgctatcgtgcctcagagctttctgaaggacgactccatcgacaacaaggtgctgaccagaagcgacaagaaccggggcaagagcgacaacgtgccctccgaagaggtcgtgaagaagatgaagaactactggcggcagctgctgaacgccaagctgattacccagagaaagttcgacaatctgaccaaggccgagagaggcggcctgagcgaactggataaggccggcttcatcaagagacagctggtggaaacccggcagatcacaaagcacgtggcacagatcctggactcccggatgaacactaagtacgacgagaatgacaagctgatccgggaagtgaaagtgatcaccctgaagtccaagctggtgtccgatttccggaaggatttccagttttacaaagtgcgcgagatcaacaactaccaccacgcccacgacgcctacctgaacgccgtcgtgggaaccgccctgatcaaaaagtaccctaagctggaaagcgagttcgtgtacggcgactacaaggtgtacgacgtgcggaagatgatcgccaagagcgagcaggaaatcggcaaggctaccgccaagtacttcttctacagcaacatcatgaactttttcaagaccgagattaccctggccaacggcgagatccggaagcggcctctgatcgagacaaacggcgaaaccggggagatcgtgtgggataagggccgggattttgccaccgtgcggaaagtgctgagcatgccccaagtgaatatcgtgaaaaagaccgaggtgcagacaggcggcttcagcaaagagtctatcctgcccaagaggaacagcgataagctgatcgccagaaagaaggactgggaccctaagaagtacggcggcttcgacagccccaccgtggcctattctgtgctggtggtggccaaagtggaaaagggcaagtccaagaaactgaagagtgtgaaagagctgctggggatcaccatcatggaaagaagcagcttcgagaagaatcccatcgactttctggaagccaagggctacaaagaagtgaaaaaggacctgatcatcaagctgcctaagtactccctgttcgagctggaaaacggccggaagagaatgctggcctctgccggcgaactgcagaagggaaacgaactggccctgccctccaaatatgtgaacttcctgtacctggccagccactatgagaagctgaagggctcccccgaggataatgagcagaaacagctgtttgtggaacagcacaagcactacctggacgagatcatcgagcagatcagcgagttctccaagagagtgatcctggccgacgctaatctggacaaagtgctgtccgcctacaacaagcaccgggataagcccatcagagagcaggccgagaatatcatccacctgtttaccctgaccaatctgggagcccctgccgccttcaagtactttgacaccaccatcgaccggaagaggtacaccagcaccaaagaggtgctggacgccaccctgatccaccagagcatcaccggcctgtacgagacacggatcgacctgtctcagctgggaggtgactccggcggcagccccgcccctgcccctgcccctgcccctgcccctgctcccgccccagcccctgctccagcccctgctcccgcccccagcggcggatctaccctgaacatcgaggacgagtacaggctgcacgagaccagcaaggagcccgacgtgagcctgggcagcacctggctgagcgatttccctcaggcttgggccgagaccggcggcatgggcctggccgtgcggcaggcccccctgattatccccctgaaggccaccagcacccccgtgagcatcaagcagtacccaatgtcccaggaggccaggctgggcatcaagcctcacatccagaggctgctggaccagggcatcctggtgccatgccagtccccctggaacacccctctgctgcccgtgaagaagcctggcaccaacgactaccggcccgtgcaggacctgagagaagtgaacaagcgggtggaggacatccacccaaccgtgcccaacccttacaacctgctgtccggcctgccccccagccaccagtggtacaccgtgctggacctgaaggacgccttcttctgcctgagactgcaccccacctctcagcccctgttcgccttcgagtggcgcgaccccgagatgggcatcagcggccagctgacctggaccagactgccacagggctttaagaatagcccaaccctgtttaacgaggccctgcacagggacctggccgacttcaggatccagcaccccgacctgattctgctgcagtacgtggacgacctgctgctggccgctaccagcgagctggactgccagcagggcaccagagccctgctgcagaccctgggcaacctgggctacagagccagcgccaagaaggcccagatctgtcagaagcaggtgaagtatctgggctacctgctgaaggaaggccagagatggctgaccgaggccagaaaggagactgtgatgggccagcccacccccaagacccccaggcagctgcgggagttcctgggcaaggccggcttttgcagactgtttatccctggcttcgccgagatggccgccccactgtaccctctgaccaagcctggcaccctgtttaactggggccccgaccagcagaaggcctaccaggagatcaagcaggccctgctgaccgcccccgccctgggcctgcccgacctgaccaagcctttcgagctgttcgtggacgagaagcagggatacgccaaaggcgtgctgacccagaagctgggcccctggcggaggcccgtggcctacctgagcaaaaaactggaccctgtggccgccggctggcccccatgcctgcggatggtggccgccatcgctgtgctgaccaaggacgccggcaagctgaccatgggccagcccctggtgatcctggcccctcacgccgtggaggctctggtgaagcagcctccagacaggtggctgtccaacgccaggatgacccactaccaggccctgctgctggacaccgaccgggtgcagttcggccctgtggtggccctgaaccccgccaccctgctgcctctgccagaggagggcctgcagcacaactgcctggacatcctggccgaggcccacggcaccaggcccgacctgaccgaccagcccctgcctgacgccgaccacacctggtacaccgacggcagctccctgctgcaggagggccagaggaaggccggcgccgccgtgaccaccgagaccgaggtgatctgggccaaagccctgcctgccggcacctccgcccagcgggccgagctgatcgccctgacccaggccctgaagatggctgagggcaagaagctgaacgtgtacaccgattccagatacgccttcgccaccgcccacatccacggcgagatctacagaagaaggggctggctgacctccgagggcaaggagatcaagaacaaggacgagattctggccctgctgaaggccctgttcctgcctaagagactgagcatcatccactgtcccggccaccagaagggccacagcgccgaggccagaggcaatagaatggccgaccaggccgccagaaaggccgccatcaccgagacccccgacaccagcaccctgctgatcgagaacagcagcccc

SEQ ID NO: 164 - protein, 1904 aa, synthetic construct
  REGION 1..1904: note = Description of Artificial Sequence: Synthetic polypeptide
DKKYSIGLDIGTNSVGWAVITDEYKVPSKKFKVLGNTDRHSIKKNLIGALLFDSGETAEATRLKRTARRRYTRRKNRICYLQEIFSNEMAKVDDSFFHRLEESFLVEEDKKHERHPIFGNIVDEVAYHEKYPTIYHLRKKLVDSTDKADLRLIYLALAHMIKFRGHFLIEGDLNPDNSDVDKLFIQLVQTYNQLFEENPINASGVDAKAILSARLSKSRRLENLIAQLPGEKKNGLFGNLIALSLGLTPNFKSNFDLAEDAKLQLSKDTYDDDLDNLLAQIGDQYADLFLAAKNLSDAILLSDILRVNTEITKAPLSASMIKRYDEHHQDLTLLKALVRQQLPEKYKEIFFDQSKNGYAGYIDGGASQEEFYKFIKPILEKMDGTEELLVKLNREDLLRKQRTFDNGSIPHQIHLGELHAILRRQEDFYPFLKDNREKIEKILTFRIPYYVGPLARGNSRFAWMTRKSEETITPWNFEEVVDKGASAQSFIERMTNFDKNLPNEKVLPKHSLLYEYFTVYNELTKVKYVTEGMRKPAFLSGEQKKAIVDLLFKTNRKVTVKQLKEDYFKKIECFDSVEISGVEDRFNASLGTYHDLLKIIKDKDFLDNEENEDILEDIVLTLTLFEDREMIEERLKTYAHLFDDKVMKQLKRRRYTGWGRLSRKLINGIRDKQSGKTILDFLKSDGFANRNFMQLIHDDSLTFKEDIQKAQVSGQGDSLHEHIANLAGSPAIKKGILQTVKVVDELVKVMGRHKPENIVIEMARENQTTQKGQKNSRERMKRIEEGIKELGSQILKEHPVENTQLQNEKLYLYYLQNGRDMYVDQELDINRLSDYDVDAIVPQSFLKDDSIDNKVLTRSDKNRGKSDNVPSEEVVKKMKNYWRQLLNAKLITQRKFDNLTKAERGGLSELDKAGFIKRQLVETRQITKHVAQILDSRMNTKYDENDKLIREVKVITLKSKLVSDFRKDFQFYKVREINNYHHAHDAYLNAVVGTALIKKYPKLESEFVYGDYKVYDVRKMIAKSEQEIGKATAKYFFYSNIMNFFKTEITLANGEIRKRPLIETNGETGEIVWDKGRDFATVRKVLSMPQVNIVKKTEVQTGGFSKESILPKRNSDKLIARKKDWDPKKYGGFDSPTVAYSVLVVAKVEKGKSKKLKSVKELLGITIMERSSFEKNPIDFLEAKGYKEVKKDLIIKLPKYSLFELENGRKRMLASAGELQKGNELALPSKYVNFLYLASHYEKLKGSPEDNEQKQLFVEQHKHYLDEIIEQISEFSKRVILADANLDKVLSAYNKHRDKPIREQAENIIHLFTLTNLGAPAAFKYFDTTIDRKRYTSTKEVLDATLIHQSITGLYETRIDLSQLGGDSGGSPAPAPAPAPAPAPAPAPAPAPAPAPSGGSTLNIEDEYRLHETSKEPDVSLGSTWLSDFPQAWAETGGMGLAVRQAPLIIPLKATSTPVSIKQYPMSQEARLGIKPHIQRLLDQGILVPCQSPWNTPLLPVKKPGTNDYRPVQDLREVNKRVEDIHPTVPNPYNLLSGLPPSHQWYTVLDLKDAFFCLRLHPTSQPLFAFEWRDPEMGISGQLTWTRLPQGFKNSPTLFNEALHRDLADFRIQHPDLILLQYVDDLLLAATSELDCQQGTRALLQTLGNLGYRASAKKAQICQKQVKYLGYLLKEGQRWLTEARKETVMGQPTPKTPRQLREFLGKAGFCRLFIPGFAEMAAPLYPLTKPGTLFNWGPDQQKAYQEIKQALLTAPALGLPDLTKPFELFVDEKQGYAKGVLTQKLGPWRRPVAYLSKKLDPVAAGWPPCLRMVAAIAVLTKDAGKLTMGQPLVILAPHAVEALVKQPPDRWLSNARMTHYQALLLDTDRVQFGPVVALNPATLLPLPEEGLQHNCLDILAEAHG

SEQ ID NO: 165 - DNA, 5712 bp, synthetic construct
  misc_feature 1..5712: note = Description of Artificial Sequence: Synthetic polynucleotide
  source 1..5712: mol_type = other DNA
gacaagaagtacagcatcggcctggacatcggcaccaactctgtgggctgggccgtgatcaccgacgagtacaaggtgcccagcaagaaattcaaggtgctgggcaacaccgaccggcacagcatcaagaagaacctgatcggagccctgctgttcgacagcggcgaaacagccgaggccacccggctgaagagaaccgccagaagaagatacaccagacggaagaaccggatctgctatctgcaagagatcttcagcaacgagatggccaaggtggacgacagcttcttccacagactggaagagtccttcctggtggaagaggataagaagcacgagcggcaccccatcttcggcaacatcgtggacgaggtggcctaccacgagaagtaccccaccatctaccacctgagaaagaaactggtggacagcaccgacaaggccgacctgcggctgatctatctggccctggcccacatgatcaagttccggggccacttcctgatcgagggcgacctgaaccccgacaacagcgacgtggacaagctgttcatccagctggtgcagacctacaaccagctgttcgaggaaaaccccatcaacgccagcggcgtggacgccaaggccatcctgtctgccagactgagcaagagcagacggctggaaaatctgatcgcccagctgcccggcgagaagaagaatggcctgttcggaaacctgattgccctgagcctgggcctgacccccaacttcaagagcaacttcgacctggccgaggatgccaaactgcagctgagcaaggacacctacgacgacgacctggacaacctgctggcccagatcggcgaccagtacgccgacctgtttctggccgccaagaacctgtccgacgccatcctgctgagcgacatcctgagagtgaacaccgagatcaccaaggcccccctgagcgcctctatgatcaagagatacgacgagcaccaccaggacctgaccctgctgaaagctctcgtgcggcagcagctgcctgagaagtacaaagagattttcttcgaccagagcaagaacggctacgccggctacattgacggcggagccagccaggaagagttctacaagttcatcaagcccatcctggaaaagatggacggcaccgaggaactgctcgtgaagctgaacagagaggacctgctgcggaagcagcggaccttcgacaacggcagcatcccccaccagatccacctgggagagctgcacgccattctgcggcggcaggaagatttttacccattcctgaaggacaaccgggaaaagatcgagaagatcctgaccttccgcatcccctactacgtgggccctctggccaggggaaacagcagattcgcctggatgaccagaaagagcgaggaaaccatcaccccctggaacttcgaggaagtggtggacaagggcgcttccgcccagagcttcatcgagcggatgaccaacttcgataagaacctgcccaacgagaaggtgctgcccaagcacagcctgctgtacgagtacttcaccgtgtataacgagctgaccaaagtgaaatacgtgaccgagggaatgagaaagcccgccttcctgagcggcgagcagaaaaaggccatcgtggacctgctgttcaagaccaaccggaaagtgaccgtgaagcagctgaaagaggactacttcaagaaaatcgagtgcttcgactccgtggaaatctccggcgtggaagatcggttcaacgcctccctgggcacataccacgatctgctgaaaattatcaaggacaaggacttcctggacaatgaggaaaacgaggacattctggaagatatcgtgctgaccctgacactgtttgaggacagagagatgatcgaggaacggctgaaaacctatgcccacctgttcgacgacaaagtgatgaagcagctgaagcggcggagatacaccggctggggcaggctgagccggaagctgatcaacggcatccgggacaagcagtccggcaagacaatcctggatttcctgaagtccgacggcttcgccaacagaaacttcatgcagctgatccacgacgacagcctgacctttaaagaggacatccagaaagcccaggtgtccggccagggcgatagcctgcacgagcacattgccaatctggccggcagccccgccattaagaagggcatcctgcagacagtgaaggtggtggacgagctcgtgaaagtgatgggccggcacaagcccgagaacatcgtgatcgaaatggccagagagaaccagaccacccagaagggacagaagaacagccgcgagagaatgaagcggatcgaagagggcatcaaagagctgggcagccagatcctgaaagaacaccccgtggaaaacacccagctgcagaacgagaagctgtacctgtactacctgcagaatgggcgggatatgtacgtggaccaggaactggacatcaaccggctgtccgactacgatgtggacgctatcgtgcctcagagctttctgaaggacgactccatcgacaacaaggtgctgaccagaagcgacaagaaccggggcaagagcgacaacgtgccctccgaagaggtcgtgaagaagatgaagaactactggcggcagctgctgaacgccaagctgattacccagagaaagttcgacaatctgaccaaggccgagagaggcggcctgagcgaactggataaggccggcttcatcaagagacagctggtggaaacccggcagatcacaaagcacgtggcacagatcctggactcccggatgaacactaagtacgacgagaatgacaagctgatccgggaagtgaaagtgatcaccctgaagtccaagctggtgtccgatttccggaaggatttccagttttacaaagtgcgcgagatcaacaactaccaccacgcccacgacgcctacctgaacgccgtcgtgggaaccgccctgatcaaaaagtaccctaagctggaaagcgagttcgtgtacggcgactacaaggtgtacgacgtgcggaagatgatcgccaagagcgagcaggaaatcggcaaggctaccgccaagtacttcttctacagcaacatcatgaactttttcaagaccgagattaccctggccaacggcgagatccggaagcggcctctgatcgagacaaacggcgaaaccggggagatcgtgtgggataagggccgggattttgccaccgtgcggaaagtgctgagcatgccccaagtgaatatcgtgaaaaagaccgaggtgcagacaggcggcttcagcaaagagtctatcctgcccaagaggaacagcgataagctgatcgccagaaagaaggactgggaccctaagaagtacggcggcttcgacagccccaccgtggcctattctgtgctggtggtggccaaagtggaaaagggcaagtccaagaaactgaagagtgtgaaagagctgctggggatcaccatcatggaaagaagcagcttcgagaagaatcccatcgactttctggaagccaagggctacaaagaagtgaaaaaggacctgatcatcaagctgcctaagtactccctgttcgagctggaaaacggccggaagagaatgctggcctctgccggcgaactgcagaagggaaacgaactggccctgccctccaaatatgtgaacttcctgtacctggccagccactatgagaagctgaagggctcccccgaggataatgagcagaaacagctgtttgtggaacagcacaagcactacctggacgagatcatcgagcagatcagcgagttctccaagagagtgatcctggccgacgctaatctggacaaagtgctgtccgcctacaacaagcaccgggataagcccatcagagagcaggccgagaatatcatccacctgtttaccctgaccaatctgggagcccctgccgccttcaagtactttgacaccaccatcgaccggaagaggtacaccagcaccaaagaggtgctggacgccaccctgatccaccagagcatcaccggcctgtacgagacacggatcgacctgtctcagctgggaggtgactccggcggcagccccgcccctgcccctgcccctgcccctgcccctgctcccgccccagcccctgctccagcccctgctcccgcccccagcggcggatctaccctgaacatcgaggacgagtacaggctgcacgagaccagcaaggagcccgacgtgagcctgggcagcacctggctgagcgatttccctcaggcttgggccgagaccggcggcatgggcctggccgtgcggcaggcccccctgattatccccctgaaggccaccagcacccccgtgagcatcaagcagtacccaatgtcccaggaggccaggctgggcatcaagcctcacatccagaggctgctggaccagggcatcctggtgccatgccagtccccctggaacacccctctgctgcccgtgaagaagcctggcaccaacgactaccggcccgtgcaggacctgagagaagtgaacaagcgggtggaggacatccacccaaccgtgcccaacccttacaacctgctgtccggcctgccccccagccaccagtggtacaccgtgctggacctgaaggacgccttcttctgcctgagactgcaccccacctctcagcccctgttcgccttcgagtggcgcgaccccgagatgggcatcagcggccagctgacctggaccagactgccacagggctttaagaatagcccaaccctgtttaacgaggccctgcacagggacctggccgacttcaggatccagcaccccgacctgattctgctgcagtacgtggacgacctgctgctggccgctaccagcgagctggactgccagcagggcaccagagccctgctgcagaccctgggcaacctgggctacagagccagcgccaagaaggcccagatctgtcagaagcaggtgaagtatctgggctacctgctgaaggaaggccagagatggctgaccgaggccagaaaggagactgtgatgggccagcccacccccaagacccccaggcagctgcgggagttcctgggcaaggccggcttttgcagactgtttatccctggcttcgccgagatggccgccccactgtaccctctgaccaagcctggcaccctgtttaactggggccccgaccagcagaaggcctaccaggagatcaagcaggccctgctgaccgcccccgccctgggcctgcccgacctgaccaagcctttcgagctgttcgtggacgagaagcagggatacgccaaaggcgtgctgacccagaagctgggcccctggcggaggcccgtggcctacctgagcaaaaaactggaccctgtggccgccggctggcccccatgcctgcggatggtggccgccatcgctgtgctgaccaaggacgccggcaagctgaccatgggccagcccctggtgatcctggcccctcacgccgtggaggctctggtgaagcagcctccagacaggtggctgtccaacgccaggatgacccactaccaggccctgctgctggacaccgaccgggtgcagttcggccctgtggtggccctgaaccccgccaccctgctgcctctgccagaggagggcctgcagcacaactgcctggacatcctggccgaggcccacggc

SEQ ID NO: 166 - RNA, 5712 nt, synthetic construct
  misc_feature 1..5712: note = Description of Artificial Sequence: Synthetic polynucleotide
  source 1..5712: mol_type = other RNA
gacaagaagtacagcatcggcctggacatcggcaccaactctgtgggctgggccgtgatcaccgacgagtacaaggtgcccagcaagaaattcaaggtgctgggcaacaccgaccggcacagcatcaagaagaacctgatcggagccctgctgttcgacagcggcgaaacagccgaggccacccggctgaagagaaccgccagaagaagatacaccagacggaagaaccggatctgctatctgcaagagatcttcagcaacgagatggccaaggtggacgacagcttcttccacagactggaagagtccttcctggtggaagaggataagaagcacgagcggcaccccatcttcggcaacatcgtggacgaggtggcctaccacgagaagtaccccaccatctaccacctgagaaagaaactggtggacagcaccgacaaggccgacctgcggctgatctatctggccctggcccacatgatcaagttccggggccacttcctgatcgagggcgacctgaaccccgacaacagcgacgtggacaagctgttcatccagctggtgcagacctacaaccagctgttcgaggaaaaccccatcaacgccagcggcgtggacgccaaggccatcctgtctgccagactgagcaagagcagacggctggaaaatctgatcgcccagctgcccggcgagaagaagaatggcctgttcggaaacctgattgccctgagcctgggcctgacccccaacttcaagagcaacttcgacctggccgaggatgccaaactgcagctgagcaaggacacctacgacgacgacctggacaacctgctggcccagatcggcgaccagtacgccgacctgtttctggccgccaagaacctgtccgacgccatcctgctgagcgacatcctgagagtgaacaccgagatcaccaaggcccccctgagcgcctctatgatcaagagatacgacgagcaccaccaggacctgaccctgctgaaagctctcgtgcggcagcagctgcctgagaagtacaaagagattttcttcgaccagagcaagaacggctacgccggctacattgacggcggagccagccaggaagagttctacaagttcatcaagcccatcctggaaaagatggacggcaccgaggaactgctcgtgaagctgaacagagaggacctgctgcggaagcagcggaccttcgacaacggcagcatcccccaccagatccacctgggagagctgcacgccattctgcggcggcaggaagatttttacccattcctgaaggacaaccgggaaaagatcgagaagatcctgaccttccgcatcccctactacgtgggccctctggccaggggaaacagcagattcgcctggatgaccagaaagagcgaggaaaccatcaccccctggaacttcgaggaagtggtggacaagggcgcttccgcccagagcttcatcgagcggatgaccaacttcgataagaacctgcccaacgagaaggtgctgcccaagcacagcctgctgtacgagtacttcaccgtgtataacgagctgaccaaagtgaaatacgtgaccgagggaatgagaaagcccgccttcctgagcggcgagcagaaaaaggccatcgtggacctgctgttcaagaccaaccggaaagtgaccgtgaagcagctgaaagaggactacttcaagaaaatcgagtgcttcgactccgtggaaatctccggcgtggaagatcggttcaacgcctccctgggcacataccacgatctgctgaaaattatcaaggacaaggacttcctggacaatgaggaaaacgaggacattctggaagatatcgtgctgaccctgacactgtttgaggacagagagatgatcgaggaacggctgaaaacctatgcccacctgttcgacgacaaagtgatgaagcagctgaagcggcggagatacaccggctggggcaggctgagccggaagctgatcaacggcatccgggacaagcagtccggcaagacaatcctggatttcctgaagtccgacggcttcgccaacagaaacttcatgcagctgatccacgacgacagcctgacctttaaagaggacatccagaaagcccaggtgtccggccagggcgatagcctgcacgagcacattgccaatctggccggcagccccgccattaagaagggcatcctgcagacagtgaaggtggtggacgagctcgtgaaagtgatgggccggcacaagcccgagaacatcgtgatcgaaatggccagagagaaccagaccacccagaagggacagaagaacagccgcgagagaatgaagcggatcgaagagggcatcaaagagctgggcagccagatcctgaaagaacaccccgtggaaaacacccagctgcagaacgagaagctgtacctgtactacctgcagaatgggcgggatatgtacgtggaccaggaactggacatcaaccggctgtccgactacgatgtggacgctatcgtgcctcagagctttctgaaggacgactccatcgacaacaaggtgctgaccagaagcgacaagaaccggggcaagagcgacaacgtgccctccgaagaggtcgtgaagaagatgaagaactactggcggcagctgctgaacgccaagctgattacccagagaaagttcgacaatctgaccaaggccgagagaggcggcctgagcgaactggataaggccggcttcatcaagagacagctggtggaaacccggcagatcacaaagcacgtggcacagatcctggactcccggatgaacactaagtacgacgagaatgacaagctgatccgggaagtgaaagtgatcaccctgaagtccaagctggtgtccgatttccggaaggatttccagttttacaaagtgcgcgagatcaacaactaccaccacgcccacgacgcctacctgaacgccgtcgtgggaaccgccctgatcaaaaagtaccctaagctggaaagcgagttcgtgtacggcgactacaaggtgtacgacgtgcggaagatgatcgccaagagcgagcaggaaatcggcaaggctaccgccaagtacttcttctacagcaacatcatgaactttttcaagaccgagattaccctggccaacggcgagatccggaagcggcctctgatcgagacaaacggcgaaaccggggagatcgtgtgggataagggccgggattttgccaccgtgcggaaagtgctgagcatgccccaagtgaatatcgtgaaaaagaccgaggtgcagacaggcggcttcagcaaagagtctatcctgcccaagaggaacagcgataagctgatcgccagaaagaaggactgggaccctaagaagtacggcggcttcgacagccccaccgtggcctattctgtgctggtggtggccaaagtggaaaagggcaagtccaagaaactgaagagtgtgaaagagctgctggggatcaccatcatggaaagaagcagcttcgagaagaatcccatcgactttctggaagccaagggctacaaagaagtgaaaaaggacctgatcatcaagctgcctaagtactccctgttcgagctggaaaacggccggaagagaatgctggcctctgccggcgaactgcagaagggaaacgaactggccctgccctccaaatatgtgaacttcctgtacctggccagccactatgagaagctgaagggctcccccgaggataatgagcagaaacagctgtttgtggaacagcacaagcactacctggacgagatcatcgagcagatcagcgagttctccaagagagtgatcctggccgacgctaatctggacaaagtgctgtccgcctacaacaagcaccgggataagcccatcagagagcaggccgagaatatcatccacctgtttaccctgaccaatctgggagcccctgccgccttcaagtactttgacaccaccatcgaccggaagaggtacaccagcaccaaagaggtgctggacgccaccctgatccaccagagcatcaccggcctgtacgagacacggatcgacctgtctcagctgggaggtgactccggcggcagccccgcccctgcccctgcccctgcccctgcccctgctcccgccccagcccctgctccagcccctgctcccgcccccagcggcggatctaccctgaacatcgaggacgagtacaggctgcacgagaccagcaaggagcccgacgtgagcctgggcagcacctggctgagcgatttccctcaggcttgggccgagaccggcggcatgggcctggccgtgcggcaggcccccctgattatccccctgaaggccaccagcacccccgtgagcatcaagcagtacccaatgtcccaggaggccaggctgggcatcaagcctcacatccagaggctgctggaccagggcatcctggtgccatgccagtccccctggaacacccctctgctgcccgtgaagaagcctggcaccaacgactaccggcccgtgcaggacctgagagaagtgaacaagcgggtggaggacatccacccaaccgtgcccaacccttacaacctgctgtccggcctgccccccagccaccagtggtacaccgtgctggacctgaaggacgccttcttctgcctgagactgcaccccacctctcagcccctgttcgccttcgagtggcgcgaccccgagatgggcatcagcggccagctgacctggaccagactgccacagggctttaagaatagcccaaccctgtttaacgaggccctgcacagggacctggccgacttcaggatccagcaccccgacctgattctgctgcagtacgtggacgacctgctgctggccgctaccagcgagctggactgccagcagggcaccagagccctgctgcagaccctgggcaacctgggctacagagccagcgccaagaaggcccagatctgtcagaagcaggtgaagtatctgggctacctgctgaaggaaggccagagatggctgaccgaggccagaaaggagactgtgatgggccagcccacccccaagacccccaggcagctgcgggagttcctgggcaaggccggcttttgcagactgtttatccctggcttcgccgagatggccgccccactgtaccctctgaccaagcctggcaccctgtttaactggggccccgaccagcagaaggcctaccaggagatcaagcaggccctgctgaccgcccccgccctgggcctgcccgacctgaccaagcctttcgagctgttcgtggacgagaagcagggatacgccaaaggcgtgctgacccagaagctgggcccctggcggaggcccgtggcctacctgagcaaaaaactggaccctgtggccgccggctggcccccatgcctgcggatggtggccgccatcgctgtgctgaccaaggacgccggcaagctgaccatgggccagcccctggtgatcctggcccctcacgccgtggaggctctggtgaagcagcctccagacaggtggctgtccaacgccaggatgacccactaccaggccctgctgctggacaccgaccgggtgcagttcggccctgtggtggccctgaaccccgccaccctgctgcctctgccagaggagggcctgcagcacaactgcctggacatcctggccgaggcccacggc

SEQ ID NO: 167 - protein, 2085 aa, synthetic construct
  REGION 1..2085: note = Description of Artificial Sequence: Synthetic polypeptide
DKKYSIGLDIGTNSVGWAVITDEYKVPSKKFKVLGNTDRHSIKKNLIGALLFDSGETAEATRLKRTARRRYTRRKNRICYLQEIFSNEMAKVDDSFFHRLEESFLVEEDKKHERHPIFGNIVDEVAYHEKYPTIYHLRKKLVDSTDKADLRLIYLALAHMIKFRGHFLIEGDLNPDNSDVDKLFIQLVQTYNQLFEENPINASGVDAKAILSARLSKSRRLENLIAQLPGEKKNGLFGNLIALSLGLTPNFKSNFDLAEDAKLQLSKDTYDDDLDNLLAQIGDQYADLFLAAKNLSDAILLSDILRVNTEITKAPLSASMIKRYDEHHQDLTLLKALVRQQLPEKYKEIFFDQSKNGYAGYIDGGASQEEFYKFIKPILEKMDGTEELLVKLNREDLLRKQRTFDNGSIPHQIHLGELHAILRRQEDFYPFLKDNREKIEKILTFRIPYYVGPLARGNSRFAWMTRKSEETITPWNFEEVVDKGASAQSFIERMTNFDKNLPNEKVLPKHSLLYEYFTVYNELTKVKYVTEGMRKPAFLSGEQKKAIVDLLFKTNRKVTVKQLKEDYFKKIECFDSVEISGVEDRFNASLGTYHDLLKIIKDKDFLDNEENEDILEDIVLTLTLFEDREMIEERLKTYAHLFDDKVMKQLKRRRYTGWGRLSRKLINGIRDKQSGKTILDFLKSDGFANRNFMQLIHDDSLTFKEDIQKAQVSGQGDSLHEHIANLAGSPAIKKGILQTVKVVDELVKVMGRHKPENIVIEMARENQTTQKGQKNSRERMKRIEEGIKELGSQILKEHPVENTQLQNEKLYLYYLQNGRDMYVDQELDINRLSDYDVDAIVPQSFLKDDSIDNKVLTRSDKNRGKSDNVPSEEVVKKMKNYWRQLLNAKLITQRKFDNLTKAERGGLSELDKAGFIKRQLVETRQITKHVAQILDSRMNTKYDENDKLIREVKVITLKSKLVSDFRKDFQFYKVREINNYHHAHDAYLNAVVGTALIKKYPKLESEFVYGDYKVYDVRKMIAKSEQEIGKATAKYFFYSNIMNFFKTEITLANGEIRKRPLIETNGETGEIVWDKGRDFATVRKVLSMPQVNIVKKTEVQTGGFSKESILPKRNSDKLIARKKDWDPKKYGGFDSPTVAYSVLVVAKVEKGKSKKLKSVKELLGITIMERSSFEKNPIDFLEAKGYKEVKKDLIIKLPKYSLFELENGRKRMLASAGELQKGNELALPSKYVNFLYLASHYEKLKGSPEDNEQKQLFVEQHKHYLDEIIEQISEFSKRVILADANLDKVLSAYNKHRDKPIREQAENIIHLFTLTNLGAPAAFKYFDTTIDRKRYTSTKEVLDATLIHQSITGLYETRIDLSQLGGDSGGSPAPAPAPAPAPAPAPAPAPAPAPAPAPAPAPAPSGGSTLNIEDEYRLHETSKEPDVSLGSTWLSDFPQAWAETGGMGLAVRQAPLIIPLKATSTPVSIKQYPMSQEARLGIKPHIQRLLDQGILVPCQSPWNTPLLPVKKPGTNDYRPVQDLREVNKRVEDIHPTVPNPYNLLSGLPPSHQWYTVLDLKDAFFCLRLHPTSQPLFAFEWRDPEMGISGQLTWTRLPQGFKNSPTLFNEALHRDLADFRIQHPDLILLQYVDDLLLAATSELDCQQGTRALLQTLGNLGYRASAKKAQICQKQVKYLGYLLKEGQRWLTEARKETVMGQPTPKTPRQLREFLGKAGFCRLFIPGFAEMAAPLYPLTKPGTLFNWGPDQQKAYQEIKQALLTAPALGLPDLTKPFELFVDEKQGYAKGVLTQKLGPWRRPVAYLSKKLDPVAAGWPPCLRMVAAIAVLTKDAGKLTMGQPLVILAPHAVEALVKQPPDRWLSNARMTHYQALLLDTDRVQFGPVVALNPATLLPLPEEGLQHNCLDILAEAHGTRPDLTDQPLPDADHTWYTDGSSLLQEGQRKAGAAVTTETEVIWAKALPAGTSAQRAELIALTQALKMAEGKKLNVYTDSRYAFATAHIHGEIYRRRGWLTSEGKEIKNKDEILALLKALFLPKRLSIIHCPGHQKGHSAEARGNRMADQAARKAAITETPDTSTLLIENSSP

SEQ ID NO: 168 - DNA, 6255 bp, synthetic construct
  misc_feature 1..6255: note = Description of Artificial Sequence: Synthetic polynucleotide
  source 1..6255: mol_type = other DNA
gacaagaagtacagcatcggcctggacatcggcaccaactctgtgggctgggccgtgatcaccgacgagtacaaggtgcccagcaagaaattcaaggtgctgggcaacaccgaccggcacagcatcaagaagaacctgatcggagccctgctgttcgacagcggcgaaacagccgaggccacccggctgaagagaaccgccagaagaagatacaccagacggaagaaccggatctgctatctgcaagagatcttcagcaacgagatggccaaggtggacgacagcttcttccacagactggaagagtccttcctggtggaagaggataagaagcacgagcggcaccccatcttcggcaacatcgtggacgaggtggcctaccacgagaagtaccccaccatctaccacctgagaaagaaactggtggacagcaccgacaaggccgacctgcggctgatctatctggccctggcccacatgatcaagttccggggccacttcctgatcgagggcgacctgaaccccgacaacagcgacgtggacaagctgttcatccagctggtgcagacctacaaccagctgttcgaggaaaaccccatcaacgccagcggcgtggacgccaaggccatcctgtctgccagactgagcaagagcagacggctggaaaatctgatcgcccagctgcccggcgagaagaagaatggcctgttcggaaacctgattgccctgagcctgggcctgacccccaacttcaagagcaacttcgacctggccgaggatgccaaactgcagctgagcaaggacacctacgacgacgacctggacaacctgctggcccagatcggcgaccagtacgccgacctgtttctggccgccaagaacctgtccgacgccatcctgctgagcgacatcctgagagtgaacaccgagatcaccaaggcccccctgagcgcctctatgatcaagagatacgacgagcaccaccaggacctgaccctgctgaaagctctcgtgcggcagcagctgcctgagaagtacaaagagattttcttcgaccagagcaagaacggctacgccggctacattgacggcggagccagccaggaagagttctacaagttcatcaagcccatcctggaaaagatggacggcaccgaggaactgctcgtgaagctgaacagagaggacctgctgcggaagcagcggaccttcgacaacggcagcatcccccaccagatccacctgggagagctgcacgccattctgcggcggcaggaagatttttacccattcctgaaggacaaccgggaaaagatcgagaagatcctgaccttccgcatcccctactacgtgggccctctggccaggggaaacagcagattcgcctggatgaccagaaagagcgaggaaaccatcaccccctggaacttcgaggaagtggtggacaagggcgcttccgcccagagcttcatcgagcggatgaccaacttcgataagaacctgcccaacgagaaggtgctgcccaagcacagcctgctgtacgagtacttcaccgtgtataacgagctgaccaaagtgaaatacgtgaccgagggaatgagaaagcccgccttcctgagcggcgagcagaaaaaggccatcgtggacctgctgttcaagaccaaccggaaagtgaccgtgaagcagctgaaagaggactacttcaagaaaatcgagtgcttcgactccgtggaaatctccggcgtggaagatcggttcaacgcctccctgggcacataccacgatctgctgaaaattatcaaggacaaggacttcctggacaatgaggaaaacgaggacattctggaagatatcgtgctgaccctgacactgtttgaggacagagagatgatcgaggaacggctgaaaacctatgcccacctgttcgacgacaaagtgatgaagcagctgaagcggcggagatacaccggctggggcaggctgagccggaagctgatcaacggcatccgggacaagcagtccggcaagacaatcctggatttcctgaagtccgacggcttcgccaacagaaacttcatgcagctgatccacgacgacagcctgacctttaaagaggacatccagaaagcccaggtgtccggccagggcgatagcctgcacgagcacattgccaatctggccggcagccccgccattaagaagggcatcctgcagacagtgaaggtggtggacgagctcgtgaaagtgatgggccggcacaagcccgagaacatcgtgatcgaaatggccagagagaaccagaccacccagaagggacagaagaacagccgcgagagaatgaagcggatcgaagagggcatcaaagagctgggcagccagatcctgaaagaacaccccgtggaaaacacccagctgcagaacgagaagctgtacctgtactacctgcagaatgggcgggatatgtacgtggaccaggaactggacatcaaccggctgtccgactacgatgtggacgctatcgtgcctcagagctttctgaaggacgactccatcgacaacaaggtgctgaccagaagcgacaagaaccggggcaagagcgacaacgtgccctccgaagaggtcgtgaagaagatgaagaactactggcggcagctgctgaacgccaagctgattacccagagaaagttcgacaatctgaccaaggccgagagaggcggcctgagcgaactggataaggccggcttcatcaagagacagctggtggaaacccggcagatcacaaagcacgtggcacagatcctggactcccggatgaacactaagtacgacgagaatgacaagctgatccgggaagtgaaagtgatcaccctgaagtccaagctggtgtccgatttccggaaggatttccagttttacaaagtgcgcgagatcaacaactaccaccacgcccacgacgcctacctgaacgccgtcgtgggaaccgccctgatcaaaaagtaccctaagctggaaagcgagttcgtgtacggcgactacaaggtgtacgacgtgcggaagatgatcgccaagagcgagcaggaaatcggcaaggctaccgccaagtacttcttctacagcaacatcatgaactttttcaagaccgagattaccctggccaacggcgagatccggaagcggcctctgatcgagacaaacggcgaaaccggggagatcgtgtgggataagggccgggattttgccaccgtgcggaaagtgctgagcatgccccaagtgaatatcgtgaaaaagaccgaggtgcagacaggcggcttcagcaaagagtctatcctgcccaagaggaacagcgataagctgatcgccagaaagaaggactgggaccctaagaagtacggcggcttcgacagccccaccgtggcctattctgtgctggtggtggccaaagtggaaaagggcaagtccaagaaactgaagagtgtgaaagagctgctggggatcaccatcatggaaagaagcagcttcgagaagaatcccatcgactttctggaagccaagggctacaaagaagtgaaaaaggacctgatcatcaagctgcctaagtactccctgttcgagctggaaaacggccggaagagaatgctggcctctgccggcgaactgcagaagggaaacgaactggccctgccctccaaatatgtgaacttcctgtacctggccagccactatgagaagctgaagggctcccccgaggataatgagcagaaacagctgtttgtggaacagcacaagcactacctggacgagatcatcgagcagatcagcgagttctccaagagagtgatcctggccgacgctaatctggacaaagtgctgtccgcctacaacaagcaccgggataagcccatcagagagcaggccgagaatatcatccacctgtttaccctgaccaatctgggagcccctgccgccttcaagtactttgacaccaccatcgaccggaagaggtacaccagcaccaaagaggtgctggacgccaccctgatccaccagagcatcaccggcctgtacgagacacggatcgacctgtctcagctgggaggtgactccggcggcagccccgcccctgcccctgcccctgcccctgcccctgcccctgcccctgctcccgcccctgctcccgcccctgctccagcccctgccccagcacccgcccccagcggcggatctaccctgaacatcgaggacgagtacaggctgcacgagaccagcaaggagcccgacgtgagcctgggcagcacctggctgagcgatttccctcaggcttgggccgagaccggcggcatgggcctggccgtgcggcaggcccccctgattatccccctgaaggccaccagcacccccgtgagcatcaagcagtacccaatgtcccaggaggccaggctgggcatcaagcctcacatccagaggctgctggaccagggcatcctggtgccatgccagtccccctggaacacccctctgctgcccgtgaagaagcctggcaccaacgactaccggcccgtgcaggacctgagagaagtgaacaagcgggtggaggacatccacccaaccgtgcccaacccttacaacctgctgtccggcctgccccccagccaccagtggtacaccgtgctggacctgaaggacgccttcttctgcctgagactgcaccccacctctcagcccctgttcgccttcgagtggcgcgaccccgagatgggcatcagcggccagctgacctggaccagactgccacagggctttaagaatagcccaaccctgtttaacgaggccctgcacagggacctggccgacttcaggatccagcaccccgacctgattctgctgcagtacgtggacgacctgctgctggccgctaccagcgagctggactgccagcagggcaccagagccctgctgcagaccctgggcaacctgggctacagagccagcgccaagaaggcccagatctgtcagaagcaggtgaagtatctgggctacctgctgaaggaaggccagagatggctgaccgaggccagaaaggagactgtgatgggccagcccacccccaagacccccaggcagctgcgggagttcctgggcaaggccggcttttgcagactgtttatccctggcttcgccgagatggccgccccactgtaccctctgaccaagcctggcaccctgtttaactggggccccgaccagcagaaggcctaccaggagatcaagcaggccctgctgaccgcccccgccctgggcctgcccgacctgaccaagcctttcgagctgttcgtggacgagaagcagggatacgccaaaggcgtgctgacccagaagctgggcccctggcggaggcccgtggcctacctgagcaaaaaactggaccctgtggccgccggctggcccccatgcctgcggatggtggccgccatcgctgtgctgaccaaggacgccggcaagctgaccatgggccagcccctggtgatcctggcccctcacgccgtggaggctctggtgaagcagcctccagacaggtggctgtccaacgccaggatgacccactaccaggccctgctgctggacaccgaccgggtgcagttcggccctgtggtggccctgaaccccgccaccctgctgcctctgccagaggagggcctgcagcacaactgcctggacatcctggccgaggcccacggcaccaggcccgacctgaccgaccagcccctgcctgacgccgaccacacctggtacaccgacggcagctccctgctgcaggagggccagaggaaggccggcgccgccgtgaccaccgagaccgaggtgatctgggccaaagccctgcctgccggcacctccgcccagcgggccgagctgatcgccctgacccaggccctgaagatggctgagggcaagaagctgaacgtgtacaccgattccagatacgccttcgccaccgcccacatccacggcgagatctacagaagaaggggctggctgacctccgagggcaaggagatcaagaacaaggacgagattctggccctgctgaaggccctgttcctgcctaagagactgagcatcatccactgtcccggccaccagaagggccacagcgccgaggccagaggcaatagaatggccgaccaggccgccagaaaggccgccatcaccgagacccccgacaccagcaccctgctgatcgagaacagcagcccc

SEQ ID NO: 169 - RNA, 6255 nt, synthetic construct
  misc_feature 1..6255: note = Description of Artificial Sequence: Synthetic polynucleotide
  source 1..6255: mol_type = other RNA
gacaagaagtacagcatcggcctggacatcggcaccaactctgtgggctgggccgtgatcaccgacgagtacaaggtgcccagcaagaaattcaaggtgctgggcaacaccgaccggcacagcatcaagaagaacctgatcggagccctgctgttcgacagcggcgaaacagccgaggccacccggctgaagagaaccgccagaagaagatacaccagacggaagaaccggatctgctatctgcaagagatcttcagcaacgagatggccaaggtggacgacagcttcttccacagactggaagagtccttcctggtggaagaggataagaagcacgagcggcaccccatcttcggcaacatcgtggacgaggtggcctaccacgagaagtaccccaccatctaccacctgagaaagaaactggtggacagcaccgacaaggccgacctgcggctgatctatctggccctggcccacatgatcaagttccggggccacttcctgatcgagggcgacctgaaccccgacaacagcgacgtggacaagctgttcatccagctggtgcagacctacaaccagctgttcgaggaaaaccccatcaacgccagcggcgtggacgccaaggccatcctgtctgccagactgagcaagagcagacggctggaaaatctgatcgcccagctgcccggcgagaagaagaatggcctgttcggaaacctgattgccctgagcctgggcctgacccccaacttcaagagcaacttcgacctggccgaggatgccaaactgcagctgagcaaggacacctacgacgacgacctggacaacctgctggcccagatcggcgaccagtacgccgacctgtttctggccgccaagaacctgtccgacgccatcctgctgagcgacatcctgagagtgaacaccgagatcaccaaggcccccctgagcgcctctatgatcaagagatacgacgagcaccaccaggacctgaccctgctgaaagctctcgtgcggcagcagctgcctgagaagtacaaagagattttcttcgaccagagcaagaacggctacgccggctacattgacggcggagccagccaggaagagttctacaagttcatcaagcccatcctggaaaagatggacggcaccgaggaactgctcgtgaagctgaacagagaggacctgctgcggaagcagcggaccttcgacaacggcagcatcccccaccagatccacctgggagagctgcacgccattctgcggcggcaggaagatttttacccattcctgaaggacaaccgggaaaagatcgagaagatcctgaccttccgcatcccctactacgtgggccctctggccaggggaaacagcagattcgcctggatgaccagaaagagcgaggaaaccatcaccccctggaacttcgaggaagtggtggacaagggcgcttccgcccagagcttcatcgagcggatgaccaacttcgataagaacctgcccaacgagaaggtgctgcccaagcacagcctgctgtacgagtacttcaccgtgtataacgagctgaccaaagtgaaatacgtgaccgagggaatgagaaagcccgccttcctgagcggcgagcagaaaaaggccatcgtggacctgctgttcaagaccaaccggaaagtgaccgtgaagcagctgaaagaggactacttcaagaaaatcgagtgcttcgactccgtggaaatctccggcgtggaagatcggttcaacgcctccctgggcacataccacgatctgctgaaaattatcaaggacaaggacttcctggacaatgaggaaaacgaggacattctggaagatatcgtgctgaccctgacactgtttgaggacagagagatgatcgaggaacggctgaaaacctatgcccacctgttcgacgacaaagtgatgaagcagctgaagcggcggagatacaccggctggggcaggctgagccggaagctgatcaacggcatccgggacaagcagtccggcaagacaatcctggatttcctgaagtccgacggcttcgccaacagaaacttcatgcagctgatccacgacgacagcctgacctttaaagaggacatccagaaagcccaggtgtccggccagggcgatagcctgcacgagcacattgccaatctggccggcagccccgccattaagaagggcatcctgcagacagtgaaggtggtggacgagctcgtgaaagtgatgggccggcacaagcccgagaacatcgtgatcgaaatggccagagagaaccagaccacccagaagggacagaagaacagccgcgagagaatgaagcggatcgaagagggcatcaaagagctgggcagccagatcctgaaagaacaccccgtggaaaacacccagctgcagaacgagaagctgtacctgtactacctgcagaatgggcgggatatgtacgtggaccaggaactggacatcaaccggctgtccgactacgatgtggacgctatcgtgcctcagagctttctgaaggacgactccatcgacaacaaggtgctgaccagaagcgacaagaaccggggcaagagcgacaacgtgccctccgaagaggtcgtgaagaagatgaagaactactggcggcagctgctgaacgccaagctgattacccagagaaagttcgacaatctgaccaaggccgagagaggcggcctgagcgaactggataaggccggcttcatcaagagacagctggtggaaacccggcagatcacaaagcacgtggcacagatcctggactcccggatgaacactaagtacgacgagaatgacaagctgatccgggaagtgaaagtgatcaccctgaagtccaagctggtgtccgatttccggaaggatttccagttttacaaagtgcgcgagatcaacaactaccaccacgcccacgacgcctacctgaacgccgtcgtgggaaccgccctgatcaaaaagtaccctaagctggaaagcgagttcgtgtacggcgactacaaggtgtacgacgtgcggaagatgatcgccaagagcgagcaggaaatcggcaaggctaccgccaagtacttcttctacagcaacatcatgaactttttcaagaccgagattaccctggccaacggcgagatccggaagcggcctctgatcgagacaaacggcgaaaccggggagatcgtgtgggataagggccgggattttgccaccgtgcggaaagtgctgagcatgccccaagtgaatatcgtgaaaaagaccgaggtgcagacaggcggcttcagcaaagagtctatcctgcccaagaggaacagcgataagctgatcgccagaaagaaggactgggaccctaagaagtacggcggcttcgacagccccaccgtggcctattctgtgctggtggtggccaaagtggaaaagggcaagtccaagaaactgaagagtgtgaaagagctgctggggatcaccatcatggaaagaagcagcttcgagaagaatcccatcgactttctggaagccaagggctacaaagaagtgaaaaaggacctgatcatcaagctgcctaagtactccctgttcgagctggaaaacggccggaagagaatgctggcctctgccggcgaactgcagaagggaaacgaactggccctgccctccaaatatgtgaacttcctgtacctggccagccactatgagaagctgaagggctcccccgaggataatgagcagaaacagctgtttgtggaacagcacaagcactacctggacgagatcatcgagcagatcagcgagttctccaagagagtgatcctggccgacgctaatctggacaaagtgctgtccgcctacaacaagcaccgggataagcccatcagagagcaggccgagaatatcatccacctgtttaccctgaccaatctgggagcccctgccgccttcaagtactttgacaccaccatcgaccggaagaggtacaccagcaccaaagaggtgctggacgccaccctgatccaccagagcatcaccggcctgtacgagacacggatcgacctgtctcagctgggaggtgactccggcggcagccccgcccctgcccctgcccctgcccctgcccctgcccctgcccctgctcccgcccctgctcccgcccctgctccagcccctgccccagcacccgcccccagcggcggatctaccctgaacatcgaggacgagtacaggctgcacgagaccagcaaggagcccgacgtgagcctgggcagcacctggctgagcgatttccctcaggcttgggccgagaccggcggcatgggcctggccgtgcggcaggcccccctgattatccccctgaaggccaccagcacccccgtgagcatcaagcagtacccaatgtcccaggaggccaggctgggcatcaagcctcacatccagaggctgctggaccagggcatcctggtgccatgccagtccccctggaacacccctctgctgcccgtgaagaagcctggcaccaacgactaccggcccgtgcaggacctgagagaagtgaacaagcgggtggaggacatccacccaaccgtgcccaacccttacaacctgctgtccggcctgccccccagccaccagtggtacaccgtgctggacctgaaggacgccttcttctgcctgagactgcaccccacctctcagcccctgttcgccttcgagtggcgcgaccccgagatgggcatcagcggccagctgacctggaccagactgccacagggctttaagaatagcccaaccctgtttaacgaggccctgcacagggacctggccgacttcaggatccagcaccccgacctgattctgctgcagtacgtggacgacctgctgctggccgctaccagcgagctggactgccagcagggcaccagagccctgctgcagaccctgggcaacctgggctacagagccagcgccaagaaggcccagatctgtcagaagcaggtgaagtatctgggctacctgctgaaggaaggccagagatggctgaccgaggccagaaaggagactgtgatgggccagcccacccccaagacccccaggcagctgcgggagttcctgggcaaggccggcttttgcagactgtttatccctggcttcgccgagatggccgccccactgtaccctctgaccaagcctggcaccctgtttaactggggccccgaccagcagaaggcctaccaggagatcaagcaggccctgctgaccgcccccgccctgggcctgcccgacctgaccaagcctttcgagctgttcgtggacgagaagcagggatacgccaaaggcgtgctgacccagaagctgggcccctggcggaggcccgtggcctacctgagcaaaaaactggaccctgtggccgccggctggcccccatgcctgcggatggtggccgccatcgctgtgctgaccaaggacgccggcaagctgaccatgggccagcccctggtgatcctggcccctcacgccgtggaggctctggtgaagcagcctccagacaggtggctgtccaacgccaggatgacccactaccaggccctgctgctggacaccgaccgggtgcagttcggccctgtggtggccctgaaccccgccaccctgctgcctctgccagaggagggcctgcagcacaactgcctggacatcctggccgaggcccacggcaccaggcccgacctgaccgaccagcccctgcctgacgccgaccacacctggtacaccgacggcagctccctgctgcaggagggccagaggaaggccggcgccgccgtgaccaccgagaccgaggtgatctgggccaaagccctgcctgccggcacctccgcccagcgggccgagctgatcgccctgacccaggccctgaagatggctgagggcaagaagctgaacgtgtacaccgattccagatacgccttcgccaccgcccacatccacggcgagatctacagaagaaggggctggctgacctccgagggcaaggagatcaagaacaaggacgagattctggccctgctgaaggccctgttcctgcctaagagactgagcatcatccactgtcccggccaccagaagggccacagcgccgaggccagaggcaatagaatggccgaccaggccgccagaaaggccgccatcaccgagacccccgacaccagcaccctgctgatcgagaacagcagcccc

SEQ ID NO: 170 - protein, 1912 aa, synthetic construct
  REGION 1..1912: note = Description of Artificial Sequence: Synthetic polypeptide
DKKYSIGLDIGTNSVGWAVITDEYKVPSKKFKVLGNTDRHSIKKNLIGALLFDSGETAEATRLKRTARRRYTRRKNRICYLQEIFSNEMAKVDDSFFHRLEESFLVEEDKKHERHPIFGNIVDEVAYHEKYPTIYHLRKKLVDSTDKADLRLIYLALAHMIKFRGHFLIEGDLNPDNSDVDKLFIQLVQTYNQLFEENPINASGVDAKAILSARLSKSRRLENLIAQLPGEKKNGLFGNLIALSLGLTPNFKSNFDLAEDAKLQLSKDTYDDDLDNLLAQIGDQYADLFLAAKNLSDAILLSDILRVNTEITKAPLSASMIKRYDEHHQDLTLLKALVRQQLPEKYKEIFFDQSKNGYAGYIDGGASQEEFYKFIKPILEKMDGTEELLVKLNREDLLRKQRTFDNGSIPHQIHLGELHAILRRQEDFYPFLKDNREKIEKILTFRIPYYVGPLARGNSRFAWMTRKSEETITPWNFEEVVDKGASAQSFIERMTNFDKNLPNEKVLPKHSLLYEYFTVYNELTKVKYVTEGMRKPAFLSGEQKKAIVDLLFKTNRKVTVKQLKEDYFKKIECFDSVEISGVEDRFNASLGTYHDLLKIIKDKDFLDNEENEDILEDIVLTLTLFEDREMIEERLKTYAHLFDDKVMKQLKRRRYTGWGRLSRKLINGIRDKQSGKTILDFLKSDGFANRNFMQLIHDDSLTFKEDIQKAQVSGQGDSLHEHIANLAGSPAIKKGILQTVKVVDELVKVMGRHKPENIVIEMARENQTTQKGQKNSRERMKRIEEGIKELGSQILKEHPVENTQLQNEKLYLYYLQNGRDMYVDQELDINRLSDYDVDAIVPQSFLKDDSIDNKVLTRSDKNRGKSDNVPSEEVVKKMKNYWRQLLNAKLITQRKFDNLTKAERGGLSELDKAGFIKRQLVETRQITKHVAQILDSRMNTKYDENDKLIREVKVITLKSKLVSDFRKDFQFYKVREINNYHHAHDAYLNAVVGTALIKKYPKLESEFVYGDYKVYDVRKMIAKSEQEIGKATAKYFFYSNIMNFFKTEITLANGEIRKRPLIETNGETGEIVWDKGRDFATVRKVLSMPQVNIVKKTEVQTGGFSKESILPKRNSDKLIARKKDWDPKKYGGFDSPTVAYSVLVVAKVEKGKSKKLKSVKELLGITIMERSSFEKNPIDFLEAKGYKEVKKDLIIKLPKYSLFELENGRKRMLASAGELQKGNELALPSKYVNFLYLASHYEKLKGSPEDNEQKQLFVEQHKHYLDEIIEQISEFSKRVILADANLDKVLSAYNKHRDKPIREQAENIIHLFTLTNLGAPAAFKYFDTTIDRKRYTSTKEVLDATLIHQSITGLYETRIDLSQLGGDSGGSPAPAPAPAPAPAPAPAPAPAPAPAPAPAPAPAPSGGSTLNIEDEYRLHETSKEPDVSLGSTWLSDFPQAWAETGGMGLAVRQAPLIIPLKATSTPVSIKQYPMSQEARLGIKPHIQRLLDQGILVPCQSPWNTPLLPVKKPGTNDYRPVQDLREVNKRVEDIHPTVPNPYNLLSGLPPSHQWYTVLDLKDAFFCLRLHPTSQPLFAFEWRDPEMGISGQLTWTRLPQGFKNSPTLFNEALHRDLADFRIQHPDLILLQYVDDLLLAATSELDCQQGTRALLQTLGNLGYRASAKKAQICQKQVKYLGYLLKEGQRWLTEARKETVMGQPTPKTPRQLREFLGKAGFCRLFIPGFAEMAAPLYPLTKPGTLFNWGPDQQKAYQEIKQALLTAPALGLPDLTKPFELFVDEKQGYAKGVLTQKLGPWRRPVAYLSKKLDPVAAGWPPCLRMVAAIAVLTKDAGKLTMGQPLVILAPHAVEALVKQPPDRWLSNARMTHYQALLLDTDRVQFGPVVALNPATLLPLPEEGLQHNCLDILAEAHG

SEQ ID NO: 171 - DNA, 5736 bp, synthetic construct
  misc_feature 1..5736: note = Description of Artificial Sequence: Synthetic polynucleotide
  source 1..5736: mol_type = other DNA
gacaagaagtacagcatcggcctggacatcggcaccaactctgtgggctgggccgtgatcaccgacgagtacaaggtgcccagcaagaaattcaaggtgctgggcaacaccgaccggcacagcatcaagaagaacctgatcggagccctgctgttcgacagcggcgaaacagccgaggccacccggctgaagagaaccgccagaagaagatacaccagacggaagaaccggatctgctatctgcaagagatcttcagcaacgagatggccaaggtggacgacagcttcttccacagactggaagagtccttcctggtggaagaggataagaagcacgagcggcaccccatcttcggcaacatcgtggacgaggtggcctaccacgagaagtaccccaccatctaccacctgagaaagaaactggtggacagcaccgacaaggccgacctgcggctgatctatctggccctggcccacatgatcaagttccggggccacttcctgatcgagggcgacctgaaccccgacaacagcgacgtggacaagctgttcatccagctggtgcagacctacaaccagctgttcgaggaaaaccccatcaacgccagcggcgtggacgccaaggccatcctgtctgccagactgagcaagagcagacggctggaaaatctgatcgcccagctgcccggcgagaagaagaatggcctgttcggaaacctgattgccctgagcctgggcctgacccccaacttcaagagcaacttcgacctggccgaggatgccaaactgcagctgagcaaggacacctacgacgacgacctggacaacctgctggcccagatcggcgaccagtacgccgacctgtttctggccgccaagaacctgtccgacgccatcctgctgagcgacatcctgagagtgaacaccgagatcaccaaggcccccctgagcgcctctatgatcaagagatacgacgagcaccaccaggacctgaccctgctgaaagctctcgtgcggcagcagctgcctgagaagtacaaagagattttcttcgaccagagcaagaacggctacgccggctacattgacggcggagccagccaggaagagttctacaagttcatcaagcccatcctggaaaagatggacggcaccgaggaactgctcgtgaagctgaacagagaggacctgctgcggaagcagcggaccttcgacaacggcagcatcccccaccagatccacctgggagagctgcacgccattctgcggcggcaggaagatttttacccattcctgaaggacaaccgggaaaagatcgagaagatcctgaccttccgcatcccctactacgtgggccctctggccaggggaaacagcagattcgcctggatgaccagaaagagcgaggaaaccatcaccccctggaacttcgaggaagtggtggacaagggcgcttccgcccagagcttcatcgagcggatgaccaacttcgataagaacctgcccaacgagaaggtgctgcccaagcacagcctgctgtacgagtacttcaccgtgtataacgagctgaccaaagtgaaatacgtgaccgagggaatgagaaagcccgccttcctgagcggcgagcagaaaaaggccatcgtggacctgctgttcaagaccaaccggaaagtgaccgtgaagcagctgaaagaggactacttcaagaaaatcgagtgcttcgactccgtggaaatctccggcgtggaagatcggttcaacgcctccctgggcacataccacgatctgctgaaaattatcaaggacaaggacttcctggacaatgaggaaaacgaggacattctggaagatatcgtgctgaccctgacactgtttgaggacagagagatgatcgaggaacggctgaaaacctatgcccacctgttcgacgacaaagtgatgaagcagctgaagcggcggagatacaccggctggggcaggctgagccggaagctgatcaacggcatccgggacaagcagtccggcaagacaatcctggatttcctgaagtccgacggcttcgccaacagaaacttcatgcagctgatccacgacgacagcctgacctttaaagaggacatccagaaagcccaggtgtccggccagggcgatagcctgcacgagcacattgccaatctggccggcagccccgccattaagaagggcatcctgcagacagtgaaggtggtggacgagctcgtgaaagtgatgggccggcacaagcccgagaacatcgtgatcgaaatggccagagagaaccagaccacccagaagggacagaagaacagccgcgagagaatgaagcggatcgaagagggcatcaaagagctgggcagccagatcctgaaagaacaccccgtggaaaacacccagctgcagaacgagaagctgtacctgtactacctgcagaatgggcgggatatgtacgtggaccaggaactggacatcaaccggctgtccgactacgatgtggacgctatcgtgcctcagagctttctgaaggacgactccatcgacaacaaggtgctgaccagaagcgacaagaaccggggcaagagcgacaacgtgccctccgaagaggtcgtgaagaagatgaagaactactggcggcagctgctgaacgccaagctgattacccagagaaagttcgacaatctgaccaaggccgagagaggcggcctgagcgaactggataaggccggcttcatcaagagacagctggtggaaacccggcagatcacaaagcacgtggcacagatcctggactcccggatgaacactaagtacgacgagaatgacaagctgatccgggaagtgaaagtgatcaccctgaagtccaagctggtgtccgatttccggaaggatttccagttttacaaagtgcgcgagatcaacaactaccaccacgcccacgacgcctacctgaacgccgtcgtgggaaccgccctgatcaaaaagtaccctaagctggaaagcgagttcgtgtacggcgactacaaggtgtacgacgtgcggaagatgatcgccaagagcgagcaggaaatcggcaaggctaccgccaagtacttcttctacagcaacatcatgaactttttcaagaccgagattaccctggccaacggcgagatccggaagcggcctctgatcgagacaaacggcgaaaccggggagatcgtgtgggataagggccgggattttgccaccgtgcggaaagtgctgagcatgccccaagtgaatatcgtgaaaaagaccgaggtgcagacaggcggcttcagcaaagagtctatcctgcccaagaggaacagcgataagctgatcgccagaaagaaggactgggaccctaagaagtacggcggcttcgacagccccaccgtggcctattctgtgctggtggtggccaaagtggaaaagggcaagtccaagaaactgaagagtgtgaaagagctgctggggatcaccatcatggaaagaagcagcttcgagaagaatcccatcgactttctggaagccaagggctacaaagaagtgaaaaaggacctgatcatcaagctgcctaagtactccctgttcgagctggaaaacggccggaagagaatgctggcctctgccggcgaactgcagaagggaaacgaactggccctgccctccaaatatgtgaacttcctgtacctggccagccactatgagaagctgaagggctcccccgaggataatgagcagaaacagctgtttgtggaacagcacaagcactacctggacgagatcatcgagcagatcagcgagttctccaagagagtgatcctggccgacgctaatctggacaaagtgctgtccgcctacaacaagcaccgggataagcccatcagagagcaggccgagaatatcatccacctgtttaccctgaccaatctgggagcccctgccgccttcaagtactttgacaccaccatcgaccggaagaggtacaccagcaccaaagaggtgctggacgccaccctgatccaccagagcatcaccggcctgtacgagacacggatcgacctgtctcagctgggaggtgactccggcggcagccccgcccctgcccctgcccctgcccctgcccctgcccctgcccctgctcccgcccctgctcccgcccctgctccagcccctgccccagcacccgcccccagcggcggatctaccctgaacatcgaggacgagtacaggctgcacgagaccagcaaggagcccgacgtgagcctgggcagcacctggctgagcgatttccctcaggcttgggccgagaccggcggcatgggcctggccgtgcggcaggcccccctgattatccccctgaaggccaccagcacccccgtgagcatcaagcagtacccaatgtcccaggaggccaggctgggcatcaagcctcacatccagaggctgctggaccagggcatcctggtgccatgccagtccccctggaacacccctctgctgcccgtgaagaagcctggcaccaacgactaccggcccgtgcaggacctgagagaagtgaacaagcgggtggaggacatccacccaaccgtgcccaacccttacaacctgctgtccggcctgccccccagccaccagtggtacaccgtgctggacctgaaggacgccttcttctgcctgagactgcaccccacctctcagcccctgttcgccttcgagtggcgcgaccccgagatgggcatcagcggccagctgacctggaccagactgccacagggctttaagaatagcccaaccctgtttaacgaggccctgcacagggacctggccgacttcaggatccagcaccccgacctgattctgctgcagtacgtggacgacctgctgctggccgctaccagcgagctggactgccagcagggcaccagagccctgctgcagaccctgggcaacctgggctacagagccagcgccaagaaggcccagatctgtcagaagcaggtgaagtatctgggctacctgctgaaggaaggccagagatggctgaccgaggccagaaaggagactgtgatgggccagcccacccccaagacccccaggcagctgcgggagttcctgggcaaggccggcttttgcagactgtttatccctggcttcgccgagatggccgccccactgtaccctctgaccaagcctggcaccctgtttaactggggccccgaccagcagaaggcctaccaggagatcaagcaggccctgctgaccgcccccgccctgggcctgcccgacctgaccaagcctttcgagctgttcgtggacgagaagcagggatacgccaaaggcgtgctgacccagaagctgggcccctggcggaggcccgtggcctacctgagcaaaaaactggaccctgtggccgccggctggcccccatgcctgcggatggtggccgccatcgctgtgctgaccaaggacgccggcaagctgaccatgggccagcccctggtgatcctggcccctcacgccgtggaggctctggtgaagcagcctccagacaggtggctgtccaacgccaggatgacccactaccaggccctgctgctggacaccgaccgggtgcagttcggccctgtggtggccctgaaccccgccaccctgctgcctctgccagaggagggcctgcagcacaactgcctggacatcctggccgaggcccacggc

SEQ ID NO: 172 - RNA, 5736 nt, synthetic construct
  misc_feature 1..5736: note = Description of Artificial Sequence: Synthetic polynucleotide
  source 1..5736: mol_type = other RNA
gacaagaagtacagcatcggcctggacatcggcaccaactctgtgggctgggccgtgatcaccgacgagtacaaggtgcccagcaagaaattcaaggtgctgggcaacaccgaccggcacagcatcaagaagaacctgatcggagccctgctgttcgacagcggcgaaacagccgaggccacccggctgaagagaaccgccagaagaagatacaccagacggaagaaccggatctgctatctgcaagagatcttcagcaacgagatggccaaggtggacgacagcttcttccacagactggaagagtccttcctggtggaagaggataagaagcacgagcggcaccccatcttcggcaacatcgtggacgaggtggcctaccacgagaagtaccccaccatctaccacctgagaaagaaactggtggacagcaccgacaaggccgacctgcggctgatctatctggccctggcccacatgatcaagttccggggccacttcctgatcgagggcgacctgaaccccgacaacagcgacgtggacaagctgttcatccagctggtgcagacctacaaccagctgttcgaggaaaaccccatcaacgccagcggcgtggacgccaaggccatcctgtctgccagactgagcaagagcagacggctggaaaatctgatcgcccagctgcccggcgagaagaagaatggcctgttcggaaacctgattgccctgagcctgggcctgacccccaacttcaagagcaacttcgacctggccgaggatgccaaactgcagctgagcaaggacacctacgacgacgacctggacaacctgctggcccagatcggcgaccagtacgccgacctgtttctggccgccaagaacctgtccgacgccatcctgctgagcgacatcctgagagtgaacaccgagatcaccaaggcccccctgagcgcctctatgatcaagagatacgacgagcaccaccaggacctgaccctgctgaaagctctcgtgcggcagcagctgcctgagaagtacaaagagattttcttcgaccagagcaagaacggctacgccggctacattgacggcggagccagccaggaagagttctacaagttcatcaagcccatcctggaaaagatggacggcaccgaggaactgctcgtgaagctgaacagagaggacctgctgcggaagcagcggaccttcgacaacggcagcatcccccaccagatccacctgggagagctgcacgccattctgcggcggcaggaagatttttacccattcctgaaggacaaccgggaaaagatcgagaagatcctgaccttccgcatcccctactacgtgggccctctggccaggggaaacagcagattcgcctggatgaccagaaagagcgaggaaaccatcaccccctggaacttcgaggaagtggtggacaagggcgcttccgcccagagcttcatcgagcggatgaccaacttcgataagaacctgcccaacgagaaggtgctgcccaagcacagcctgctgtacgagtacttcaccgtgtataacgagctgaccaaagtgaaatacgtgaccgagggaatgagaaagcccgccttcctgagcggcgagcagaaaaaggccatcgtggacctgctgttcaagaccaaccggaaagtgaccgtgaagcagctgaaagaggactacttcaagaaaatcgagtgcttcgactccgtggaaatctccggcgtggaagatcggttcaacgcctccctgggcacataccacgatctgctgaaaattatcaaggacaaggacttcctggacaatgaggaaaacgaggacattctggaagatatcgtgctgaccctgacactgtttgaggacagagagatgatcgaggaacggctgaaaacctatgcccacctgttcgacgacaaagtgatgaagcagctgaagcggcggagatacaccggctggggcaggctgagccggaagctgatcaacggcatccgggacaagcagtccggcaagacaatcctggatttcctgaagtccgacggcttcgccaacagaaacttcatgcagctgatccacgacgacagcctgacctttaaagaggacatccagaaagcccaggtgtccggccagggcgatagcctgcacgagcacattgccaatctggccggcagccccgccattaagaagggcatcctgcagacagtgaaggtggtggacgagctcgtgaaagtgatgggccggcacaagcccgagaacatcgtgatcgaaatggccagagagaaccagaccacccagaagggacagaagaacagccgcgagagaatgaagcggatcgaagagggcatcaaagagctgggcagccagatcctgaaagaacaccccgtggaaaacacccagctgcagaacgagaagctgtacctgtactacctgcagaatgggcgggatatgtacgtggaccaggaactggacatcaaccggctgtccgactacgatgtggacgctatcgtgcctcagagctttctgaaggacgactccatcgacaacaaggtgctgaccagaagcgacaagaaccggggcaagagcgacaacgtgccctccgaagaggtcgtgaagaagatgaagaactactggcggcagctgctgaacgccaagctgattacccagagaaagttcgacaatctgaccaaggccgagagaggcggcctgagcgaactggataaggccggcttcatcaagagacagctggtggaaacccggcagatcacaaagcacgtggcacagatcctggactcccggatgaacactaagtacgacgagaatgacaagctgatccgggaagtgaaagtgatcaccctgaagtccaagctggtgtccgatttccggaaggatttccagttttacaaagtgcgcgagatcaacaactaccaccacgcccacgacgcctacctgaacgccgtcgtgggaaccgccctgatcaaaaagtaccctaagctggaaagcgagttcgtgtacggcgactacaaggtgtacgacgtgcggaagatgatcgccaagagcgagcaggaaatcggcaaggctaccgccaagtacttcttctacagcaacatcatgaactttttcaagaccgagattaccctggccaacggcgagatccggaagcggcctctgatcgagacaaacggcgaaaccggggagatcgtgtgggataagggccgggattttgccaccgtgcggaaagtgctgagcatgccccaagtgaatatcgtgaaaaagaccgaggtgcagacaggcggcttcagcaaagagtctatcctgcccaagaggaacagcgataagctgatcgccagaaagaaggactgggaccctaagaagtacggcggcttcgacagccccaccgtggcctattctgtgctggtggtggccaaagtggaaaagggcaagtccaagaaactgaagagtgtgaaagagctgctggggatcaccatcatggaaagaagcagcttcgagaagaatcccatcgactttctggaagccaagggctacaaagaagtgaaaaaggacctgatcatcaagctgcctaagtactccctgttcgagctggaaaacggccggaagagaatgctggcctctgccggcgaactgcagaagggaaacgaactggccctgccctccaaatatgtgaacttcctgtacctggccagccactatgagaagctgaagggctcccccgaggataatgagcagaaacagctgtttgtggaacagcacaagcactacctggacgagatcatcgagcagatcagcgagttctccaagagagtgatcctggccgacgctaatctggacaaagtgctgtccgcctacaacaagcaccgggataagcccatcagagagcaggccgagaatatcatccacctgtttaccctgaccaatctgggagcccctgccgccttcaagtactttgacaccaccatcgaccggaagaggtacaccagcaccaaagaggtgctggacgccaccctgatccaccagagcatcaccggcctgtacgagacacggatcgacctgtctcagctgggaggtgactccggcggcagccccgcccctgcccctgcccctgcccctgcccctgcccctgcccctgctcccgcccctgctcccgcccctgctccagcccctgccccagcacccgcccccagcggcggatctaccctgaacatcgaggacgagtacaggctgcacgagaccagcaaggagcccgacgtgagcctgggcagcacctggctgagcgatttccctcaggcttgggccgagaccggcggcatgggcctggccgtgcggcaggcccccctgattatccccctgaaggccaccagcacccccgtgagcatcaagcagtacccaatgtcccaggaggccaggctgggcatcaagcctcacatccagaggctgctggaccagggcatcctggtgccatgccagtccccctggaacacccctctgctgcccgtgaagaagcctggcaccaacgactaccggcccgtgcaggacctgagagaagtgaacaagcgggtggaggacatccacccaaccgtgcccaacccttacaacctgctgtccggcctgccccccagccaccagtggtacaccgtgctggacctgaaggacgccttcttctgcctgagactgcaccccacctctcagcccctgttcgccttcgagtggcgcgaccccgagatgggcatcagcggccagctgacctggaccagactgccacagggctttaagaatagcccaaccctgtttaacgaggccctgcacagggacctggccgacttcaggatccagcaccccgacctgattctgctgcagtacgtggacgacctgctgctggccgctaccagcgagctggactgccagcagggcaccagagccctgctgcagaccctgggcaacctgggctacagagccagcgccaagaaggcccagatctgtcagaagcaggtgaagtatctgggctacctgctgaaggaaggccagagatggctgaccgaggccagaaaggagactgtgatgggccagcccacccccaagacccccaggcagctgcgggagttcctgggcaaggccggcttttgcagactgtttatccctggcttcgccgagatggccgccccactgtaccctctgaccaagcctggcaccctgtttaactggggccccgaccagcagaaggcctaccaggagatcaagcaggccctgctgaccgcccccgccctgggcctgcccgacctgaccaagcctttcgagctgttcgtggacgagaagcagggatacgccaaaggcgtgctgacccagaagctgggcccctggcggaggcccgtggcctacctgagcaaaaaactggaccctgtggccgccggctggcccccatgcctgcggatggtggccgccatcgctgtgctgaccaaggacgccggcaagctgaccatgggccagcccctggtgatcctggcccctcacgccgtggaggctctggtgaagcagcctccagacaggtggctgtccaacgccaggatgacccactaccaggccctgctgctggacaccgaccgggtgcagttcggccctgtggtggccctgaaccccgccaccctgctgcctctgccagaggagggcctgcagcacaactgcctggacatcctggccgaggcccacggc

SEQ ID NO: 173 - protein, 2060 aa, synthetic construct
  REGION 1..2060: note = Description of Artificial Sequence: Synthetic polypeptide
DKKYSIGLDIGTNSVGWAVITDEYKVPSKKFKVLGNTDRHSIKKNLIGALLFDSGETAEATRLKRTARRRYTRRKNRICYLQEIFSNEMAKVDDSFFHRLEESFLVEEDKKHERHPIFGNIVDEVAYHEKYPTIYHLRKKLVDSTDKADLRLIYLALAHMIKFRGHFLIEGDLNPDNSDVDKLFIQLVQTYNQLFEENPINASGVDAKAILSARLSKSRRLENLIAQLPGEKKNGLFGNLIALSLGLTPNFKSNFDLAEDAKLQLSKDTYDDDLDNLLAQIGDQYADLFLAAKNLSDAILLSDILRVNTEITKAPLSASMIKRYDEHHQDLTLLKALVRQQLPEKYKEIFFDQSKNGYAGYIDGGASQEEFYKFIKPILEKMDGTEELLVKLNREDLLRKQRTFDNGSIPHQIHLGELHAILRRQEDFYPFLKDNREKIEKILTFRIPYYVGPLARGNSRFAWMTRKSEETITPWNFEEVVDKGASAQSFIERMTNFDKNLPNEKVLPKHSLLYEYFTVYNELTKVKYVTEGMRKPAFLSGEQKKAIVDLLFKTNRKVTVKQLKEDYFKKIECFDSVEISGVEDRFNASLGTYHDLLKIIKDKDFLDNEENEDILEDIVLTLTLFEDREMIEERLKTYAHLFDDKVMKQLKRRRYTGWGRLSRKLINGIRDKQSGKTILDFLKSDGFANRNFMQLIHDDSLTFKEDIQKAQVSGQGDSLHEHIANLAGSPAIKKGILQTVKVVDELVKVMGRHKPENIVIEMARENQTTQKGQKNSRERMKRIEEGIKELGSQILKEHPVENTQLQNEKLYLYYLQNGRDMYVDQELDINRLSDYDVDAIVPQSFLKDDSIDNKVLTRSDKNRGKSDNVPSEEVVKKMKNYWRQLLNAKLITQRKFDNLTKAERGGLSELDKAGFIKRQLVETRQITKHVAQILDSRMNTKYDENDKLIREVKVITLKSKLVSDFRKDFQFYKVREINNYHHAHDAYLNAVVGTALIKKYPKLESEFVYGDYKVYDVRKMIAKSEQEIGKATAKYFFYSNIMNFFKTEITLANGEIRKRPLIETNGETGEIVWDKGRDFATVRKVLSMPQVNIVKKTEVQTGGFSKESILPKRNSDKLIARKKDWDPKKYGGFDSPTVAYSVLVVAKVEKGKSKKLKSVKELLGITIMERSSFEKNPIDFLEAKGYKEVKKDLIIKLPKYSLFELENGRKRMLASAGELQKGNELALPSKYVNFLYLASHYEKLKGSPEDNEQKQLFVEQHKHYLDEIIEQISEFSKRVILADANLDKVLSAYNKHRDKPIREQAENIIHLFTLTNLGAPAAFKYFDTTIDRKRYTSTKEVLDATLIHQSITGLYETRIDLSQLGGDSGSETPGTSESATPESTLNIEDEYRLHETSKEPDVSLGSTWLSDFPQAWAETGGMGLAVRQAPLIIPLKATSTPVSIKQYPMSQEARLGIKPHIQRLLDQGILVPCQSPWNTPLLPVKKPGTNDYRPVQDLREVNKRVEDIHPTVPNPYNLLSGLPPSHQWYTVLDLKDAFFCLRLHPTSQPLFAFEWRDPEMGISGQLTWTRLPQGFKNSPTLFNEALHRDLADFRIQHPDLILLQYVDDLLLAATSELDCQQGTRALLQTLGNLGYRASAKKAQICQKQVKYLGYLLKEGQRWLTEARKETVMGQPTPKTPRQLREFLGKAGFCRLFIPGFAEMAAPLYPLTKPGTLFNWGPDQQKAYQEIKQALLTAPALGLPDLTKPFELFVDEKQGYAKGVLTQKLGPWRRPVAYLSKKLDPVAAGWPPCLRMVAAIAVLTKDAGKLTMGQPLVILAPHAVEALVKQPPDRWLSNARMTHYQALLLDTDRVQFGPVVALNPATLLPLPEEGLQHNCLDILAEAHGTRPDLTDQPLPDADHTWYTDGSSLLQEGQRKAGAAVTTETEVIWAKALPAGTSAQRAELIALTQALKMAEGKKLNVYTDSRYAFATAHIHGEIYRRRGWLTSEGKEIKNKDEILALLKALFLPKRLSIIHCPGHQKGHSAEARGNRMADQAARKAAITETPDTSTLLIENSSP

SEQ ID NO: 174 - DNA, 6180 bp, synthetic construct
  misc_feature 1..6180: note = Description of Artificial Sequence: Synthetic polynucleotide
  source 1..6180: mol_type = other DNA
gacaagaagtacagcatcggcctggacatcggcaccaactctgtgggctgggccgtgatcaccgacgagtacaaggtgcccagcaagaaattcaaggtgctgggcaacaccgaccggcacagcatcaagaagaacctgatcggagccctgctgttcgacagcggcgaaacagccgaggccacccggctgaagagaaccgccagaagaagatacaccagacggaagaaccggatctgctatctgcaagagatcttcagcaacgagatggccaaggtggacgacagcttcttccacagactggaagagtccttcctggtggaagaggataagaagcacgagcggcaccccatcttcggcaacatcgtggacgaggtggcctaccacgagaagtaccccaccatctaccacctgagaaagaaactggtggacagcaccgacaaggccgacctgcggctgatctatctggccctggcccacatgatcaagttccggggccacttcctgatcgagggcgacctgaaccccgacaacagcgacgtggacaagctgttcatccagctggtgcagacctacaaccagctgttcgaggaaaaccccatcaacgccagcggcgtggacgccaaggccatcctgtctgccagactgagcaagagcagacggctggaaaatctgatcgcccagctgcccggcgagaagaagaatggcctgttcggaaacctgattgccctgagcctgggcctgacccccaacttcaagagcaacttcgacctggccgaggatgccaaactgcagctgagcaaggacacctacgacgacgacctggacaacctgctggcccagatcggcgaccagtacgccgacctgtttctggccgccaagaacctgtccgacgccatcctgctgagcgacatcctgagagtgaacaccgagatcaccaaggcccccctgagcgcctctatgatcaagagatacgacgagcaccaccaggacctgaccctgctgaaagctctcgtgcggcagcagctgcctgagaagtacaaagagattttcttcgaccagagcaagaacggctacgccggctacattgacggcggagccagccaggaagagttctacaagttcatcaagcccatcctggaaaagatggacggcaccgaggaactgctcgtgaagctgaacagagaggacctgctgcggaagcagcggaccttcgacaacggcagcatcccccaccagatccacctgggagagctgcacgccattctgcggcggcaggaagatttttacccattcctgaaggacaaccgggaaaagatcgagaagatcctgaccttccgcatcccctactacgtgggccctctggccaggggaaacagcagattcgcctggatgaccagaaagagcgaggaaaccatcaccccctggaacttcgaggaagtggtggacaagggcgcttccgcccagagcttcatcgagcggatgaccaacttcgataagaacctgcccaacgagaaggtgctgcccaagcacagcctgctgtacgagtacttcaccgtgtataacgagctgaccaaagtgaaatacgtgaccgagggaatgagaaagcccgccttcctgagcggcgagcagaaaaaggccatcgtggacctgctgttcaagaccaaccggaaagtgaccgtgaagcagctgaaagaggactacttcaagaaaatcgagtgcttcgactccgtggaaatctccggcgtggaagatcggttcaacgcctccctgggcacataccacgatctgctgaaaattatcaaggacaaggacttcctggacaatgaggaaaacgaggacattctggaagatatcgtgctgaccctgacactgtttgaggacagagagatgatcgaggaacggctgaaaacctatgcccacctgttcgacgacaaagtgatgaagcagctgaagcggcggagatacaccggctggggcaggctgagccggaagctgatcaacggcatccgggacaagcagtccggcaagacaatcctggatttcctgaagtccgacggcttcgccaacagaaacttcatgcagctgatccacgacgacagcctgacctttaaagaggacatccagaaagcccaggtgtccggccagggcgatagcctgcacgagcacattgccaatctggccggcagccccgccattaagaagggcatcctgcagacagtgaaggtggtggacgagctcgtgaaagtgatgggccggcacaagcccgagaacatcgtgatcgaaatggccagagagaaccagaccacccagaagggacagaagaacagccgcgagagaatgaagcggatcgaagagggcatcaaagagctgggcagccagatcctgaaagaacaccccgtggaaaacacccagctgcagaacgagaagctgtacctgtactacctgcagaatgggcgggatatgtacgtggaccaggaactggacatcaaccggctgtccgactacgatgtggacgctatcgtgcctcagagctttctgaaggacgactccatcgacaacaaggtgctgaccagaagcgacaagaaccggggcaagagcgacaacgtgccctccgaagaggtcgtgaagaagatgaagaactactggcggcagctgctgaacgccaagctgattacccagagaaagttcgacaatctgaccaaggccgagagaggcggcctgagcgaactggataaggccggcttcatcaagagacagctggtggaaacccggcagatcacaaagcacgtggcacagatcctggactcccggatgaacactaagtacgacgagaatgacaagctgatccgggaagtgaaagtgatcaccctgaagtccaagctggtgtccgatttccggaaggatttccagttttacaaagtgcgcgagatcaacaactaccaccacgcccacgacgcctacctgaacgccgtcgtgggaaccgccctgatcaaaaagtaccctaagctggaaagcgagttcgtgtacggcgactacaaggtgtacgacgtgcggaagatgatcgccaagagcgagcaggaaatcggcaaggctaccgccaagtacttcttctacagcaacatcatgaactttttcaagaccgagattaccctggccaacggcgagatccggaagcggcctctgatcgagacaaacggcgaaaccggggagatcgtgtgggataagggccgggattttgccaccgtgcggaaagtgctgagcatgccccaagtgaatatcgtgaaaaagaccgaggtgcagacaggcggcttcagcaaagagtctatcctgcccaagaggaacagcgataagctgatcgccagaaagaaggactgggaccctaagaagtacggcggcttcgacagccccaccgtggcctattctgtgctggtggtggccaaagtggaaaagggcaagtccaagaaactgaagagtgtgaaagagctgctggggatcaccatcatggaaagaagcagcttcgagaagaatcccatcgactttctggaagccaagggctacaaagaagtgaaaaaggacctgatcatcaagctgcctaagtactccctgttcgagctggaaaacggccggaagagaatgctggcctctgccggcgaactgcagaagggaaacgaactggccctgccctccaaatatgtgaacttcctgtacctggccagccactatgagaagctgaagggctcccccgaggataatgagcagaaacagctgtttgtggaacagcacaagcactacctggacgagatcatcgagcagatcagcgagttctccaagagagtgatcctggccgacgctaatctggacaaagtgctgtccgcctacaacaagcaccgggataagcccatcagagagcaggccgagaatatcatccacctgtttaccctgaccaatctgggagcccctgccgccttcaagtactttgacaccaccatcgaccggaagaggtacaccagcaccaaagaggtgctggacgccaccctgatccaccagagcatcaccggcctgtacgagacacggatcgacctgtctcagctgggaggtgactccggcagcgaaacccctggcaccagcgagagcgccacacccgagtctaccctgaacatcgaggacgagtacaggctgcacgagaccagcaaggagcccgacgtgagcctgggcagcacctggctgagcgatttccctcaggcttgggccgagaccggcggcatgggcctggccgtgcggcaggcccccctgattatccccctgaaggccaccagcacccccgtgagcatcaagcagtacccaatgtcccaggaggccaggctgggcatcaagcctcacatccagaggctgctggaccagggcatcctggtgccatgccagtccccctggaacacccctctgctgcccgtgaagaagcctggcaccaacgactaccggcccgtgcaggacctgagagaagtgaacaagcgggtggaggacatccacccaaccgtgcccaacccttacaacctgctgtccggcctgccccccagccaccagtggtacaccgtgctggacctgaaggacgccttcttctgcctgagactgcaccccacctctcagcccctgttcgccttcgagtggcgcgaccccgagatgggcatcagcggccagctgacctggaccagactgccacagggctttaagaatagcccaaccctgtttaacgaggccctgcacagggacctggccgacttcaggatccagcaccccgacctgattctgctgcagtacgtggacgacctgctgctggccgctaccagcgagctggactgccagcagggcaccagagccctgctgcagaccctgggcaacctgggctacagagccagcgccaagaaggcccagatctgtcagaagcaggtgaagtatctgggctacctgctgaaggaaggccagagatggctgaccgaggccagaaaggagactgtgatgggccagcccacccccaagacccccaggcagctgcgggagttcctgggcaaggccggcttttgcagactgtttatccctggcttcgccgagatggccgccccactgtaccctctgaccaagcctggcaccctgtttaactggggccccgaccagcagaaggcctaccaggagatcaagcaggccctgctgaccgcccccgccctgggcctgcccgacctgaccaagcctttcgagctgttcgtggacgagaagcagggatacgccaaaggcgtgctgacccagaagctgggcccctggcggaggcccgtggcctacctgagcaaaaaactggaccctgtggccgccggctggcccccatgcctgcggatggtggccgccatcgctgtgctgaccaaggacgccggcaagctgaccatgggccagcccctggtgatcctggcccctcacgccgtggaggctctggtgaagcagcctccagacaggtggctgtccaacgccaggatgacccactaccaggccctgctgctggacaccgaccgggtgcagttcggccctgtggtggccctgaaccccgccaccctgctgcctctgccagaggagggcctgcagcacaactgcctggacatcctggccgaggcccacggcaccaggcccgacctgaccgaccagcccctgcctgacgccgaccacacctggtacaccgacggcagctccctgctgcaggagggccagaggaaggccggcgccgccgtgaccaccgagaccgaggtgatctgggccaaagccctgcctgccggcacctccgcccagcgggccgagctgatcgccctgacccaggccctgaagatggctgagggcaagaagctgaacgtgtacaccgattccagatacgccttcgccaccgcccacatccacggcgagatctacagaagaaggggctggctgacctccgagggcaaggagatcaagaacaaggacgagattctggccctgctgaaggccctgttcctgcctaagagactgagcatcatccactgtcccggccaccagaagggccacagcgccgaggccagaggcaatagaatggccgaccaggccgccagaaaggccgccatcaccgagacccccgacaccagcaccctgctgatcgagaacagcagcccc

SEQ ID NO: 175 - RNA, 6180 nt, synthetic construct
  misc_feature 1..6180: note = Description of Artificial Sequence: Synthetic polynucleotide
  source 1..6180: mol_type = other RNA
gacaagaagtacagcatcggcctggacatcggcaccaactctgtgggctgggccgtgatcaccgacgagtacaaggtgcccagcaagaaattcaaggtgctgggcaacaccgaccggcacagcatcaagaagaacctgatcggagccctgctgttcgacagcggcgaaacagccgaggccacccggctgaagagaaccgccagaagaagatacaccagacggaagaaccggatctgctatctgcaagagatcttcagcaacgagatggccaaggtggacgacagcttcttccacagactggaagagtccttcctggtggaagaggataagaagcacgagcggcaccccatcttcggcaacatcgtggacgaggtggcctaccacgagaagtaccccaccatctaccacctgagaaagaaactggtggacagcaccgacaaggccgacctgcggctgatctatctggccctggcccacatgatcaagttccggggccacttcctgatcgagggcgacctgaaccccgacaacagcgacgtggacaagctgttcatccagctggtgcagacctacaaccagctgttcgaggaaaaccccatcaacgccagcggcgtggacgccaaggccatcctgtctgccagactgagcaagagcagacggctggaaaatctgatcgcccagctgcccggcgagaagaagaatggcctgttcggaaacctgattgccctgagcctgggcctgacccccaacttcaagagcaacttcgacctggccgaggatgccaaactgcagctgagcaaggacacctacgacgacgacctggacaacctgctggcccagatcggcgaccagtacgccgacctgtttctggccgccaagaacctgtccgacgccatcctgctgagcgacatcctgagagtgaacaccgagatcaccaaggcccccctgagcgcctctatgatcaagagatacgacgagcaccaccaggacctgaccctgctgaaagctctcgtgcggcagcagctgcctgagaagtacaaagagattttcttcgaccagagcaagaacggctacgccggctacattgacggcggagccagccaggaagagttctacaagttcatcaagcccatcctggaaaagatggacggcaccgaggaactgctcgtgaagctgaacagagaggacctgctgcggaagcagcggaccttcgacaacggcagcatcccccaccagatccacctgggagagctgcacgccattctgcggcggcaggaagatttttacccattcctgaaggacaaccgggaaaagatcgagaagatcctgaccttccgcatcccctactacgtgggccctctggccaggggaaacagcagattcgcctggatgaccagaaagagcgaggaaaccatcaccccctggaacttcgaggaagtggtggacaagggcgcttccgcccagagcttcatcgagcggatgaccaacttcgataagaacctgcccaacgagaaggtgctgcccaagcacagcctgctgtacgagtacttcaccgtgtataacgagctgaccaaagtgaaatacgtgaccgagggaatgagaaagcccgccttcctgagcggcgagcagaaaaaggccatcgtggacctgctgttcaagaccaaccggaaagtgaccgtgaagcagctgaaagaggactacttcaagaaaatcgagtgcttcgactccgtggaaatctccggcgtggaagatcggttcaacgcctccctgggcacataccacgatctgctgaaaattatcaaggacaaggacttcctggacaatgaggaaaacgaggacattctggaagatatcgtgctgaccctgacactgtttgaggacagagagatgatcgaggaacggctgaaaacctatgcccacctgttcgacgacaaagtgatgaagcagctgaagcggcggagatacaccggctggggcaggctgagccggaagctgatcaacggcatccgggacaagcagtccggcaagacaatcctggatttcctgaagtccgacggcttcgccaacagaaacttcatgcagctgatccacgacgacagcctgacctttaaagaggacatccagaaagcccaggtgtccggccagggcgatagcctgcacgagcacattgccaatctggccggcagccccgccattaagaagggcatcctgcagacagtgaaggtggtggacgagctcgtgaaagtgatgggccggcacaagcccgagaacatcgtgatcgaaatggccagagagaaccagaccacccagaagggacagaagaacagccgcgagagaatgaagcggatcgaagagggcatcaaagagctgggcagccagatcctgaaagaacaccccgtggaaaacacccagctgcagaacgagaagctgtacctgtactacctgcagaatgggcgggatatgtacgtggaccaggaactggacatcaaccggctgtccgactacgatgtggacgctatcgtgcctcagagctttctgaaggacgactccatcgacaacaaggtgctgaccagaagcgacaagaaccggggcaagagcgacaacgtgccctccgaagaggtcgtgaagaagatgaagaactactggcggcagctgctgaacgccaagctgattacccagagaaagttcgacaatctgaccaaggccgagagaggcggcctgagcgaactggataaggccggcttcatcaagagacagctggtggaaacccggcagatcacaaagcacgtggcacagatcctggactcccggatgaacactaagtacgacgagaatgacaagctgatccgggaagtgaaagtgatcaccctgaagtccaagctggtgtccgatttccggaaggatttccagttttacaaagtgcgcgagatcaacaactaccaccacgcccacgacgcctacctgaacgccgtcgtgggaaccgccctgatcaaaaagtaccctaagctggaaagcgagttcgtgtacggcgactacaaggtgtacgacgtgcggaagatgatcgccaagagcgagcaggaaatcggcaaggctaccgccaagtacttcttctacagcaacatcatgaactttttcaagaccgagattaccctggccaacggcgagatccggaagcggcctctgatcgagacaaacggcgaaaccggggagatcgtgtgggataagggccgggattttgccaccgtgcggaaagtgctgagcatgccccaagtgaatatcgtgaaaaagaccgaggtgcagacaggcggcttcagcaaagagtctatcctgcccaagaggaacagcgataagctgatcgccagaaagaaggactgggaccctaagaagtacggcggcttcgacagccccaccgtggcctattctgtgctggtggtggccaaagtggaaaagggcaagtccaagaaactgaagagtgtgaaagagctgctggggatcaccatcatggaaagaagcagcttcgagaagaatcccatcgactttctggaagccaagggctacaaagaagtgaaaaaggacctgatcatcaagctgcctaagtactccctgttcgagctggaaaacggccggaagagaatgctggcctctgccggcgaactgcagaagggaaacgaactggccctgccctccaaatatgtgaacttcctgtacctggccagccactatgagaagctgaagggctcccccgaggataatgagcagaaacagctgtttgtggaacagcacaagcactacctggacgagatcatcgagcagatcagcgagttctccaagagagtgatcctggccgacgctaatctggacaaagtgctgtccgcctacaacaagcaccgggataagcccatcagagagcaggccgagaatatcatccacctgtttaccctgaccaatctgggagcccctgccgccttcaagtactttgacaccaccatcgaccggaagaggtacaccagcaccaaagaggtgctggacgccaccctgatccaccagagcatcaccggcctgtacgagacacggatcgacctgtctcagctgggaggtgactccggcagcgaaacccctggcaccagcgagagcgccacacccgagtctaccctgaacatcgaggacgagtacaggctgcacgagaccagcaaggagcccgacgtgagcctgggcagcacctggctgagcgatttccctcaggcttgggccgagaccggcggcatgggcctggccgtgcggcaggcccccctgattatccccctgaaggccaccagcacccccgtgagcatcaagcagtacccaatgtcccaggaggccaggctgggcatcaagcctcacatccagaggctgctggaccagggcatcctggtgccatgccagtccccctggaacacccctctgctgcccgtgaagaagcctggcaccaacgactaccggcccgtgcaggacctgagagaagtgaacaagcgggtggaggacatccacccaaccgtgcccaacccttacaacctgctgtccggcctgccccccagccaccagtggtacaccgtgctggacctgaaggacgccttcttctgcctgagactgcaccccacctctcagcccctgttcgccttcgagtggcgcgaccccgagatgggcatcagcggccagctgacctggaccagactgccacagggctttaagaatagcccaaccctgtttaacgaggccctgcacagggacctggccgacttcaggatccagcaccccgacctgattctgctgcagtacgtggacgacctgctgctggccgctaccagcgagctggactgccagcagggcaccagagccctgctgcagaccctgggcaacctgggctacagagccagcgccaagaaggcccagatctgtcagaagcaggtgaagtatctgggctacctgctgaaggaaggccagagatggctgaccgaggccagaaaggagactgtgatgggccagcccacccccaagacccccaggcagctgcgggagttcctgggcaaggccggcttttgcagactgtttatccctggcttcgccgagatggccgccccactgtaccctctgaccaagcctggcaccctgtttaactggggccccgaccagcagaaggcctaccaggagatcaagcaggccctgctgaccgcccccgccctgggcctgcccgacctgaccaagcctttcgagctgttcgtggacgagaagcagggatacgccaaaggcgtgctgacccagaagctgggcccctggcggaggcccgtggcctacctgagcaaaaaactggaccctgtggccgccggctggcccccatgcctgcggatggtggccgccatcgctgtgctgaccaaggacgccggcaagctgaccatgggccagcccctggtgatcctggcccctcacgccgtggaggctctggtgaagcagcctccagacaggtggctgtccaacgccaggatgacccactaccaggccctgctgctggacaccgaccgggtgcagttcggccctgtggtggccctgaaccccgccaccctgctgcctctgccagaggagggcctgcagcacaactgcctggacatcctggccgaggcccacggcaccaggcccgacctgaccgaccagcccctgcctgacgccgaccacacctggtacaccgacggcagctccctgctgcaggagggccagaggaaggccggcgccgccgtgaccaccgagaccgaggtgatctgggccaaagccctgcctgccggcacctccgcccagcgggccgagctgatcgccctgacccaggccctgaagatggctgagggcaagaagctgaacgtgtacaccgattccagatacgccttcgccaccgcccacatccacggcgagatctacagaagaaggggctggctgacctccgagggcaaggagatcaagaacaaggacgagattctggccctgctgaaggccctgttcctgcctaagagactgagcatcatccactgtcccggccaccagaagggccacagcgccgaggccagaggcaatagaatggccgaccaggccgccagaaaggccgccatcaccgagacccccgacaccagcaccctgctgatcgagaacagcagcccc

SEQ ID NO: 176 - protein, 1887 aa, synthetic construct
  REGION 1..1887: note = Description of Artificial Sequence: Synthetic polypeptide
DKKYSIGLDIGTNSVGWAVITDEYKVPSKKFKVLGNTDRHSIKKNLIGALLFDSGETAEATRLKRTARRRYTRRKNRICYLQEIFSNEMAKVDDSFFHRLEESFLVEEDKKHERHPIFGNIVDEVAYHEKYPTIYHLRKKLVDSTDKADLRLIYLALAHMIKFRGHFLIEGDLNPDNSDVDKLFIQLVQTYNQLFEENPINASGVDAKAILSARLSKSRRLENLIAQLPGEKKNGLFGNLIALSLGLTPNFKSNFDLAEDAKLQLSKDTYDDDLDNLLAQIGDQYADLFLAAKNLSDAILLSDILRVNTEITKAPLSASMIKRYDEHHQDLTLLKALVRQQLPEKYKEIFFDQSKNGYAGYIDGGASQEEFYKFIKPILEKMDGTEELLVKLNREDLLRKQRTFDNGSIPHQIHLGELHAILRRQEDFYPFLKDNREKIEKILTFRIPYYVGPLARGNSRFAWMTRKSEETITPWNFEEVVDKGASAQSFIERMTNFDKNLPNEKVLPKHSLLYEYFTVYNELTKVKYVTEGMRKPAFLSGEQKKAIVDLLFKTNRKVTVKQLKEDYFKKIECFDSVEISGVEDRFNASLGTYHDLLKIIKDKDFLDNEENEDILEDIVLTLTLFEDREMIEERLKTYAHLFDDKVMKQLKRRRYTGWGRLSRKLINGIRDKQSGKTILDFLKSDGFANRNFMQLIHDDSLTFKEDIQKAQVSGQGDSLHEHIANLAGSPAIKKGILQTVKVVDELVKVMGRHKPENIVIEMARENQTTQKGQKNSRERMKRIEEGIKELGSQILKEHPVENTQLQNEKLYLYYLQNGRDMYVDQELDINRLSDYDVDAIVPQSFLKDDSIDNKVLTRSDKNRGKSDNVPSEEVVKKMKNYWRQLLNAKLITQRKFDNLTKAERGGLSELDKAGFIKRQLVETRQITKHVAQILDSRMNTKYDENDKLIREVKVITLKSKLVSDFRKDFQFYKVREINNYHHAHDAYLNAVVGTALIKKYPKLESEFVYGDYKVYDVRKMIAKSEQEIGKATAKYFFYSNIMNFFKTEITLANGEIRKRPLIETNGETGEIVWDKGRDFATVRKVLSMPQVNIVKKTEVQTGGFSKESILPKRNSDKLIARKKDWDPKKYGGFDSPTVAYSVLVVAKVEKGKSKKLKSVKELLGITIMERSSFEKNPIDFLEAKGYKEVKKDLIIKLPKYSLFELENGRKRMLASAGELQKGNELALPSKYVNFLYLASHYEKLKGSPEDNEQKQLFVEQHKHYLDEIIEQISEFSKRVILADANLDKVLSAYNKHRDKPIREQAENIIHLFTLTNLGAPAAFKYFDTTIDRKRYTSTKEVLDATLIHQSITGLYETRIDLSQLGGDSGSETPGTSESATPESTLNIEDEYRLHETSKEPDVSLGSTWLSDFPQAWAETGGMGLAVRQAPLIIPLKATSTPVSIKQYPMSQEARLGIKPHIQRLLDQGILVPCQSPWNTPLLPVKKPGTNDYRPVQDLREVNKRVEDIHPTVPNPYNLLSGLPPSHQWYTVLDLKDAFFCLRLHPTSQPLFAFEWRDPEMGISGQLTWTRLPQGFKNSPTLFNEALHRDLADFRIQHPDLILLQYVDDLLLAATSELDCQQGTRALLQTLGNLGYRASAKKAQICQKQVKYLGYLLKEGQRWLTEARKETVMGQPTPKTPRQLREFLGKAGFCRLFIPGFAEMAAPLYPLTKPGTLFNWGPDQQKAYQEIKQALLTAPALGLPDLTKPFELFVDEKQGYAKGVLTQKLGPWRRPVAYLSKKLDPVAAGWPPCLRMVAAIAVLTKDAGKLTMGQPLVILAPHAVEALVKQPPDRWLSNARMTHYQALLLDTDRVQFGPVVALNPATLLPLPEEGLQHNCLDILAEAHG

SEQ ID NO: 177 - DNA, 5661 bp, synthetic construct
  misc_feature 1..5661: note = Description of Artificial Sequence: Synthetic polynucleotide
  source 1..5661: mol_type = other DNA
gacaagaagtacagcatcggcctggacatcggcaccaactctgtgggctgggccgtgatcaccgacgagtacaaggtgcccagcaagaaattcaaggtgctgggcaacaccgaccggcacagcatcaagaagaacctgatcggagccctgctgttcgacagcggcgaaacagccgaggccacccggctgaagagaaccgccagaagaagatacaccagacggaagaaccggatctgctatctgcaagagatcttcagcaacgagatggccaaggtggacgacagcttcttccacagactggaagagtccttcctggtggaagaggataagaagcacgagcggcaccccatcttcggcaacatcgtggacgaggtggcctaccacgagaagtaccccaccatctaccacctgagaaagaaactggtggacagcaccgacaaggccgacctgcggctgatctatctggccctggcccacatgatcaagttccggggccacttcctgatcgagggcgacctgaaccccgacaacagcgacgtggacaagctgttcatccagctggtgcagacctacaaccagctgttcgaggaaaaccccatcaacgccagcggcgtggacgccaaggccatcctgtctgccagactgagcaagagcagacggctggaaaatctgatcgcccagctgcccggcgagaagaagaatggcctgttcggaaacctgattgccctgagcctgggcctgacccccaacttcaagagcaacttcgacctggccgaggatgccaaactgcagctgagcaaggacacctacgacgacgacctggacaacctgctggcccagatcggcgaccagtacgccgacctgtttctggccgccaagaacctgtccgacgccatcctgctgagcgacatcctgagagtgaacaccgagatcaccaaggcccccctgagcgcctctatgatcaagagatacgacgagcaccaccaggacctgaccctgctgaaagctctcgtgcggcagcagctgcctgagaagtacaaagagattttcttcgaccagagcaagaacggctacgccggctacattgacggcggagccagccaggaagagttctacaagttcatcaagcccatcctggaaaagatggacggcaccgaggaactgctcgtgaagctgaacagagaggacctgctgcggaagcagcggaccttcgacaacggcagcatcccccaccagatccacctgggagagctgcacgccattctgcggcggcaggaagatttttacccattcctgaaggacaaccgggaaaagatcgagaagatcctgaccttccgcatcccctactacgtgggccctctggccaggggaaacagcagattcgcctggatgaccagaaagagcgaggaaaccatcaccccctggaacttcgaggaagtggtggacaagggcgcttccgcccagagcttcatcgagcggatgaccaacttcgataagaacctgcccaacgagaaggtgctgcccaagcacagcctgctgtacgagtacttcaccgtgtataacgagctgaccaaagtgaaatacgtgaccgagggaatgagaaagcccgccttcctgagcggcgagcagaaaaaggccatcgtggacctgctgttcaagaccaaccggaaagtgaccgtgaagcagctgaaagaggactacttcaagaaaatcgagtgcttcgactccgtggaaatctccggcgtggaagatcggttcaacgcctccctgggcacataccacgatctgctgaaaattatcaaggacaaggacttcctggacaatgaggaaaacgaggacattctggaagatatcgtgctgaccctgacactgtttgaggacagagagatgatcgaggaacggctgaaaacctatgcccacctgttcgacgacaaagtgatgaagcagctgaagcggcggagatacaccggctggggcaggctgagccggaagctgatcaacggcatccgggacaagcagtccggcaagacaatcctggatttcctgaagtccgacggcttcgccaacagaaacttcatgcagctgatccacgacgacagcctgacctttaaagaggacatccagaaagcccaggtgtccggccagggcgatagcctgcacgagcacattgccaatctggccggcagccccgccattaagaagggcatcctgcagacagtgaaggtggtggacgagctcgtgaaagtgatgggccggcacaagcccgagaacatcgtgatcgaaatggccagagagaaccagaccacccagaagggacagaagaacagccgcgagagaatgaagcggatcgaagagggcatcaaagagctgggcagccagatcctgaaagaacaccccgtggaaaacacccagctgcagaacgagaagctgtacctgtactacctgcagaatgggcgggatatgtacgtggaccaggaactggacatcaaccggctgtccgactacgatgtggacgctatcgtgcctcagagctttctgaaggacgactccatcgacaacaaggtgctgaccagaagcgacaagaaccggggcaagagcgacaacgtgccctccgaagaggtcgtgaagaagatgaagaactactggcggcagctgctgaacgccaagctgattacccagagaaagttcgacaatctgaccaaggccgagagaggcggcctgagcgaactggataaggccggcttcatcaagagacagctggtggaaacccggcagatcacaaagcacgtggcacagatcctggactcccggatgaacactaagtacgacgagaatgacaagctgatccgggaagtgaaagtgatcaccctgaagtccaagctggtgtccgatttccggaaggatttccagttttacaaagtgcgcgagatcaacaactaccaccacgcccacgacgcctacctgaacgccgtcgtgggaaccgccctgatcaaaaagtaccctaagctggaaagcgagttcgtgtacggcgactacaaggtgtacgacgtgcggaagatgatcgccaagagcgagcaggaaatcggcaaggctaccgccaagtacttcttctacagcaacatcatgaactttttcaagaccgagattaccctggccaacggcgagatccggaagcggcctctgatcgagacaaacggcgaaaccggggagatcgtgtgggataagggccgggattttgccaccgtgcggaaagtgctgagcatgccccaagtgaatatcgtgaaaaagaccgaggtgcagacaggcggcttcagcaaagagtctatcctgcccaagaggaacagcgataagctgatcgccagaaagaaggactgggaccctaagaagtacggcggcttcgacagccccaccgtggcctattctgtgctggtggtggccaaagtggaaaagggcaagtccaagaaactgaagagtgtgaaagagctgctggggatcaccatcatggaaagaagcagcttcgagaagaatcccatcgactttctggaagccaagggctacaaagaagtgaaaaaggacctgatcatcaagctgcctaagtactccctgttcgagctggaaaacggccggaagagaatgctggcctctgccggcgaactgcagaagggaaacgaactggccctgccctccaaatatgtgaacttcctgtacctggccagccactatgagaagctgaagggctcccccgaggataatgagcagaaacagctgtttgtggaacagcacaagcactacctggacgagatcatcgagcagatcagcgagttctccaagagagtgatcctggccgacgctaatctggacaaagtgctgtccgcctacaacaagcaccgggataagcccatcagagagcaggccgagaatatcatccacctgtttaccctgaccaatctgggagcccctgccgccttcaagtactttgacaccaccatcgaccggaagaggtacaccagcaccaaagaggtgctggacgccaccctgatccaccagagcatcaccggcctgtacgagacacggatcgacctgtctcagctgggaggtgactccggcagcgaaacccctggcaccagcgagagcgccacacccgagtctaccctgaacatcgaggacgagtacaggctgcacgagaccagcaaggagcccgacgtgagcctgggcagcacctggctgagcgatttccctcaggcttgggccgagaccggcggcatgggcctggccgtgcggcaggcccccctgattatccccctgaaggccaccagcacccccgtgagcatcaagcagtacccaatgtcccaggaggccaggctgggcatcaagcctcacatccagaggctgctggaccagggcatcctggtgccatgccagtccccctggaacacccctctgctgcccgtgaagaagcctggcaccaacgactaccggcccgtgcaggacctgagagaagtgaacaagcgggtggaggacatccacccaaccgtgcccaacccttacaacctgctgtccggcctgccccccagccaccagtggtacaccgtgctggacctgaaggacgccttcttctgcctgagactgcaccccacctctcagcccctgttcgccttcgagtggcgcgaccccgagatgggcatcagcggccagctgacctggaccagactgccacagggctttaagaatagcccaaccctgtttaacgaggccctgcacagggacctggccgacttcaggatccagcaccccgacctgattctgctgcagtacgtggacgacctgctgctggccgctaccagcgagctggactgccagcagggcaccagagccctgctgcagaccctgggcaacctgggctacagagccagcgccaagaaggcccagatctgtcagaagcaggtgaagtatctgggctacctgctgaaggaaggccagagatggctgaccgaggccagaaaggagactgtgatgggccagcccacccccaagacccccaggcagctgcgggagttcctgggcaaggccggcttttgcagactgtttatccctggcttcgccgagatggccgccccactgtaccctctgaccaagcctggcaccctgtttaactggggccccgaccagcagaaggcctaccaggagatcaagcaggccctgctgaccgcccccgccctgggcctgcccgacctgaccaagcctttcgagctgttcgtggacgagaagcagggatacgccaaaggcgtgctgacccagaagctgggcccctggcggaggcccgtggcctacctgagcaaaaaactggaccctgtggccgccggctggcccccatgcctgcggatggtggccgccatcgctgtgctgaccaaggacgccggcaagctgaccatgggccagcccctggtgatcctggcccctcacgccgtggaggctctggtgaagcagcctccagacaggtggctgtccaacgccaggatgacccactaccaggccctgctgctggacaccgaccgggtgcagttcggccctgtggtggccctgaaccccgccaccctgctgcctctgccagaggagggcctgcagcacaactgcctggacatcctggccgaggcccacggc

SEQ ID NO: 178 - RNA, 5661 nt, synthetic construct
  misc_feature 1..5661: note = Description of Artificial Sequence: Synthetic polynucleotide
  source 1..5661: mol_type = other RNA
gacaagaagtacagcatcggcctggacatcggcaccaactctgtgggctgggccgtgatcaccgacgagtacaaggtgcccagcaagaaattcaaggtgctgggcaacaccgaccggcacagcatcaagaagaacctgatcggagccctgctgttcgacagcggcgaaacagccgaggccacccggctgaagagaaccgccagaagaagatacaccagacggaagaaccggatctgctatctgcaagagatcttcagcaacgagatggccaaggtggacgacagcttcttccacagactggaagagtccttcctggtggaagaggataagaagcacgagcggcaccccatcttcggcaacatcgtggacgaggtggcctaccacgagaagtaccccaccatctaccacctgagaaagaaactggtggacagcaccgacaaggccgacctgcggctgatctatctggccctggcccacatgatcaagttccggggccacttcctgatcgagggcgacctgaaccccgacaacagcgacgtggacaagctgttcatccagctggtgcagacctacaaccagctgttcgaggaaaaccccatcaacgccagcggcgtggacgccaaggccatcctgtctgccagactgagcaagagcagacggctggaaaatctgatcgcccagctgcccggcgagaagaagaatggcctgttcggaaacctgattgccctgagcctgggcctgacccccaacttcaagagcaacttcgacctggccgaggatgccaaactgcagctgagcaaggacacctacgacgacgacctggacaacctgctggcccagatcggcgaccagtacgccgacctgtttctggccgccaagaacctgtccgacgccatcctgctgagcgacatcctgagagtgaacaccgagatcaccaaggcccccctgagcgcctctatgatcaagagatacgacgagcaccaccaggacctgaccctgctgaaagctctcgtgcggcagcagctgcctgagaagtacaaagagattttcttcgaccagagcaagaacggctacgccggctacattgacggcggagccagccaggaagagttctacaagttcatcaagcccatcctggaaaagatggacggcaccgaggaactgctcgtgaagctgaacagagaggacctgctgcggaagcagcggaccttcgacaacggcagcatcccccaccagatccacctgggagagctgcacgccattctgcggcggcaggaagatttttacccattcctgaaggacaaccgggaaaagatcgagaagatcctgaccttccgcatcccctactacgtgggccctctggccaggggaaacagcagattcgcctggatgaccagaaagagcgaggaaaccatcaccccctggaacttcgaggaagtggtggacaagggcgcttccgcccagagcttcatcgagcggatgaccaacttcgataagaacctgcccaacgagaaggtgctgcccaagcacagcctgctgtacgagtacttcaccgtgtataacgagctgaccaaagtgaaatacgtgaccgagggaatgagaaagcccgccttcctgagcggcgagcagaaaaaggccatcgtggacctgctgttcaagaccaaccggaaagtgaccgtgaagcagctgaaagaggactacttcaagaaaatcgagtgcttcgactccgtggaaatctccggcgtggaagatcggttcaacgcctccctgggcacataccacgatctgctgaaaattatcaaggacaaggacttcctggacaatgaggaaaacgaggacattctggaagatatcgtgctgaccctgacactgtttgaggacagagagatgatcgaggaacggctgaaaacctatgcccacctgttcgacgacaaagtgatgaagcagctgaagcggcggagatacaccggctggggcaggctgagccggaagctgatcaacggcatccgggacaagcagtccggcaagacaatcctggatttcctgaagtccgacggcttcgccaacagaaacttcatgcagctgatccacgacgacagcctgacctttaaagaggacatccagaaagcccaggtgtccggccagggcgatagcctgcacgagcacattgccaatctggccggcagccccgccattaagaagggcatcctgcagacagtgaaggtggtggacgagctcgtgaaagtgatgggccggcacaagcccgagaacatcgtgatcgaaatggccagagagaaccagaccacccagaagggacagaagaacagccgcgagagaatgaagcggatcgaagagggcatcaaagagctgggcagccagatcctgaaagaacaccccgtggaaaacacccagctgcagaacgagaagctgtacctgtactacctgcagaatgggcgggatatgtacgtggaccaggaactggacatcaaccggctgtccgactacgatgtggacgctatcgtgcctcagagctttctgaaggacgactccatcgacaacaaggtgctgaccagaagcgacaagaaccggggcaagagcgacaacgtgccctccgaagaggtcgtgaagaagatgaagaactactggcggcagctgctgaacgccaagctgattacccagagaaagttcgacaatctgaccaaggccgagagaggcggcctgagcgaactggataaggccggcttcatcaagagacagctggtggaaacccggcagatcacaaagcacgtggcacagatcctggactcccggatgaacactaagtacgacgagaatgacaagctgatccgggaagtgaaagtgatcaccctgaagtccaagctggtgtccgatttccggaaggatttccagttttacaaagtgcgcgagatcaacaactaccaccacgcccacgacgcctacctgaacgccgtcgtgggaaccgccctgatcaaaaagtaccctaagctggaaagcgagttcgtgtacggcgactacaaggtgtacgacgtgcggaagatgatcgccaagagcgagcaggaaatcggcaaggctaccgccaagtacttcttctacagcaacatcatgaactttttcaagaccgagattaccctggccaacggcgagatccggaagcggcctctgatcgagacaaacggcgaaaccggggagatcgtgtgggataagggccgggattttgccaccgtgcggaaagtgctgagcatgccccaagtgaatatcgtgaaaaagaccgaggtgcagacaggcggcttcagcaaagagtctatcctgcccaagaggaacagcgataagctgatcgccagaaagaaggactgggaccctaagaagtacggcggcttcgacagccccaccgtggcctattctgtgctggtggtggccaaagtggaaaagggcaagtccaagaaactgaagagtgtgaaagagctgctggggatcaccatcatggaaagaagcagcttcgagaagaatcccatcgactttctggaagccaagggctacaaagaagtgaaaaaggacctgatcatcaagctgcctaagtactccctgttcgagctggaaaacggccggaagagaatgctggcctctgccggcgaactgcagaagggaaacgaactggccctgccctccaaatatgtgaacttcctgtacctggccagccactatgagaagctgaagggctcccccgaggataatgagcagaaacagctgtttgtggaacagcacaagcactacctggacgagatcatcgagcagatcagcgagttctccaagagagtgatcctggccgacgctaatctggacaaagtgctgtccgcctacaacaagcaccgggataagcccatcagagagcaggccgagaatatcatccacctgtttaccctgaccaatctgggagcccctgccgccttcaagtactttgacaccaccatcgaccggaagaggtacaccagcaccaaagaggtgctggacgccaccctgatccaccagagcatcaccggcctgtacgagacacggatcgacctgtctcagctgggaggtgactccggcagcgaaacccctggcaccagcgagagcgccacacccgagtctaccctgaacatcgaggacgagtacaggctgcacgagaccagcaaggagcccgacgtgagcctgggcagcacctggctgagcgatttccctcaggcttgggccgagaccggcggcatgggcctggccgtgcggcaggcccccctgattatccccctgaaggccaccagcacccccgtgagcatcaagcagtacccaatgtcccaggaggccaggctgggcatcaagcctcacatccagaggctgctggaccagggcatcctggtgccatgccagtccccctggaacacccctctgctgcccgtgaagaagcctggcaccaacgactaccggcccgtgcaggacctgagagaagtgaacaagcgggtggaggacatccacccaaccgtgcccaacccttacaacctgctgtccggcctgccccccagccaccagtggtacaccgtgctggacctgaaggacgccttcttctgcctgagactgcaccccacctctcagcccctgttcgccttcgagtggcgcgaccccgagatgggcatcagcggccagctgacctggaccagactgccacagggctttaagaatagcccaaccctgtttaacgaggccctgcacagggacctggccgacttcaggatccagcaccccgacctgattctgctgcagtacgtggacgacctgctgctggccgctaccagcgagctggactgccagcagggcaccagagccctgctgcagaccctgggcaacctgggctacagagccagcgccaagaaggcccagatctgtcagaagcaggtgaagtatctgggctacctgctgaaggaaggccagagatggctgaccgaggccagaaaggagactgtgatgggccagcccacccccaagacccccaggcagctgcgggagttcctgggcaaggccggcttttgcagactgtttatccctggcttcgccgagatggccgccccactgtaccctctgaccaagcctggcaccctgtttaactggggccccgaccagcagaaggcctaccaggagatcaagcaggccctgctgaccgcccccgccctgggcctgcccgacctgaccaagcctttcgagctgttcgtggacgagaagcagggatacgccaaaggcgtgctgacccagaagctgggcccctggcggaggcccgtggcctacctgagcaaaaaactggaccctgtggccgccggctggcccccatgcctgcggatggtggccgccatcgctgtgctgaccaaggacgccggcaagctgaccatgggccagcccctggtgatcctggcccctcacgccgtggaggctctggtgaagcagcctccagacaggtggctgtccaacgccaggatgacccactaccaggccctgctgctggacaccgaccgggtgcagttcggccctgtggtggccctgaaccccgccaccctgctgcctctgccagaggagggcctgcagcacaactgcctggacatcctggccgaggcccacggc

SEQ ID NO: 179 - protein, 2064 aa, synthetic construct
  REGION 1..2064: note = Description of Artificial Sequence: Synthetic polypeptide
DKKYSIGLDIGTNSVGWAVITDEYKVPSKKFKVLGNTDRHSIKKNLIGALLFDSGETAEATRLKRTARRRYTRRKNRICYLQEIFSNEMAKVDDSFFHRLEESFLVEEDKKHERHPIFGNIVDEVAYHEKYPTIYHLRKKLVDSTDKADLRLIYLALAHMIKFRGHFLIEGDLNPDNSDVDKLFIQLVQTYNQLFEENPINASGVDAKAILSARLSKSRRLENLIAQLPGEKKNGLFGNLIALSLGLTPNFKSNFDLAEDAKLQLSKDTYDDDLDNLLAQIGDQYADLFLAAKNLSDAILLSDILRVNTEITKAPLSASMIKRYDEHHQDLTLLKALVRQQLPEKYKEIFFDQSKNGYAGYIDGGASQEEFYKFIKPILEKMDGTEELLVKLNREDLLRKQRTFDNGSIPHQIHLGELHAILRRQEDFYPFLKDNREKIEKILTFRIPYYVGPLARGNSRFAWMTRKSEETITPWNFEEVVDKGASAQSFIERMTNFDKNLPNEKVLPKHSLLYEYFTVYNELTKVKYVTEGMRKPAFLSGEQKKAIVDLLFKTNRKVTVKQLKEDYFKKIECFDSVEISGVEDRFNASLGTYHDLLKIIKDKDFLDNEENEDILEDIVLTLTLFEDREMIEERLKTYAHLFDDKVMKQLKRRRYTGWGRLSRKLINGIRDKQSGKTILDFLKSDGFANRNFMQLIHDDSLTFKEDIQKAQVSGQGDSLHEHIANLAGSPAIKKGILQTVKVVDELVKVMGRHKPENIVIEMARENQTTQKGQKNSRERMKRIEEGIKELGSQILKEHPVENTQLQNEKLYLYYLQNGRDMYVDQELDINRLSDYDVDAIVPQSFLKDDSIDNKVLTRSDKNRGKSDNVPSEEVVKKMKNYWRQLLNAKLITQRKFDNLTKAERGGLSELDKAGFIKRQLVETRQITKHVAQILDSRMNTKYDENDKLIREVKVITLKSKLVSDFRKDFQFYKVREINNYHHAHDAYLNAVVGTALIKKYPKLESEFVYGDYKVYDVRKMIAKSEQEIGKATAKYFFYSNIMNFFKTEITLANGEIRKRPLIETNGETGEIVWDKGRDFATVRKVLSMPQVNIVKKTEVQTGGFSKESILPKRNSDKLIARKKDWDPKKYGGFDSPTVAYSVLVVAKVEKGKSKKLKSVKELLGITIMERSSFEKNPIDFLEAKGYKEVKKDLIIKLPKYSLFELENGRKRMLASAGELQKGNELALPSKYVNFLYLASHYEKLKGSPEDNEQKQLFVEQHKHYLDEIIEQISEFSKRVILADANLDKVLSAYNKHRDKPIREQAENIIHLFTLTNLGAPAAFKYFDTTIDRKRYTSTKEVLDATLIHQSITGLYETRIDLSQLGGDSGGSSGSETPGTSESATPESTLNIEDEYRLHETSKEPDVSLGSTWLSDFPQAWAETGGMGLAVRQAPLIIPLKATSTPVSIKQYPMSQEARLGIKPHIQRLLDQGILVPCQSPWNTPLLPVKKPGTNDYRPVQDLREVNKRVEDIHPTVPNPYNLLSGLPPSHQWYTVLDLKDAFFCLRLHPTSQPLFAFEWRDPEMGISGQLTWTRLPQGFKNSPTLFNEALHRDLADFRIQHPDLILLQYVDDLLLAATSELDCQQGTRALLQTLGNLGYRASAKKAQICQKQVKYLGYLLKEGQRWLTEARKETVMGQPTPKTPRQLREFLGKAGFCRLFIPGFAEMAAPLYPLTKPGTLFNWGPDQQKAYQEIKQALLTAPALGLPDLTKPFELFVDEKQGYAKGVLTQKLGPWRRPVAYLSKKLDPVAAGWPPCLRMVAAIAVLTKDAGKLTMGQPLVILAPHAVEALVKQPPDRWLSNARMTHYQALLLDTDRVQFGPVVALNPATLLPLPEEGLQHNCLDILAEAHGTRPDLTDQPLPDADHTWYTDGSSLLQEGQRKAGAAVTTETEVIWAKALPAGTSAQRAELIALTQALKMAEGKKLNVYTDSRYAFATAHIHGEIYRRRGWLTSEGKEIKNKDEILALLKALFLPKRLSIIHCPGHQKGHSAEARGNRMADQAARKAAITETPDTSTLLIENSSP

SEQ ID NO: 180 - DNA, 6192 bp, synthetic construct
  misc_feature 1..6192: note = Description of Artificial Sequence: Synthetic polynucleotide
  source 1..6192: mol_type = other DNA
gacaagaagtacagcatcggcctggacatcggcaccaactctgtgggctgggccgtgatcaccgacgagtacaaggtgcccagcaagaaattcaaggtgctgggcaacaccgaccggcacagcatcaagaagaacctgatcggagccctgctgttcgacagcggcgaaacagccgaggccacccggctgaagagaaccgccagaagaagatacaccagacggaagaaccggatctgctatctgcaagagatcttcagcaacgagatggccaaggtggacgacagcttcttccacagactggaagagtccttcctggtggaagaggataagaagcacgagcggcaccccatcttcggcaacatcgtggacgaggtggcctaccacgagaagtaccccaccatctaccacctgagaaagaaactggtggacagcaccgacaaggccgacctgcggctgatctatctggccctggcccacatgatcaagttccggggccacttcctgatcgagggcgacctgaaccccgacaacagcgacgtggacaagctgttcatccagctggtgcagacctacaaccagctgttcgaggaaaaccccatcaacgccagcggcgtggacgccaaggccatcctgtctgccagactgagcaagagcagacggctggaaaatctgatcgcccagctgcccggcgagaagaagaatggcctgttcggaaacctgattgccctgagcctgggcctgacccccaacttcaagagcaacttcgacctggccgaggatgccaaactgcagctgagcaaggacacctacgacgacgacctggacaacctgctggcccagatcggcgaccagtacgccgacctgtttctggccgccaagaacctgtccgacgccatcctgctgagcgacatcctgagagtgaacaccgagatcaccaaggcccccctgagcgcctctatgatcaagagatacgacgagcaccaccaggacctgaccctgctgaaagctctcgtgcggcagcagctgcctgagaagtacaaagagattttcttcgaccagagcaagaacggctacgccggctacattgacggcggagccagccaggaagagttctacaagttcatcaagcccatcctggaaaagatggacggcaccgaggaactgctcgtgaagctgaacagagaggacctgctgcggaagcagcggaccttcgacaacggcagcatcccccaccagatccacctgggagagctgcacgccattctgcggcggcaggaagatttttacccattcctgaaggacaaccgggaaaagatcgagaagatcctgaccttccgcatcccctactacgtgggccctctggccaggggaaacagcagattcgcctggatgaccagaaagagcgaggaaaccatcaccccctggaacttcgaggaagtggtggacaagggcgcttccgcccagagcttcatcgagcggatgaccaacttcgataagaacctgcccaacgagaaggtgctgcccaagcacagcctgctgtacgagtacttcaccgtgtataacgagctgaccaaagtgaaatacgtgaccgagggaatgagaaagcccgccttcctgagcggcgagcagaaaaaggccatcgtggacctgctgttcaagaccaaccggaaagtgaccgtgaagcagctgaaagaggactacttcaagaaaatcgagtgcttcgactccgtggaaatctccggcgtggaagatcggttcaacgcctccctgggcacataccacgatctgctgaaaattatcaaggacaaggacttcctggacaatgaggaaaacgaggacattctggaagatatcgtgctgaccctgacactgtttgaggacagagagatgatcgaggaacggctgaaaacctatgcccacctgttcgacgacaaagtgatgaagcagctgaagcggcggagatacaccggctggggcaggctgagccggaagctgatcaacggcatccgggacaagcagtccggcaagacaatcctggatttcctgaagtccgacggcttcgccaacagaaacttcatgcagctgatccacgacgacagcctgacctttaaagaggacatccagaaagcccaggtgtccggccagggcgatagcctgcacgagcacattgccaatctggccggcagccccgccattaagaagggcatcctgcagacagtgaaggtggtggacgagctcgtgaaagtgatgggccggcacaagcccgagaacatcgtgatcgaaatggccagagagaaccagaccacccagaagggacagaagaacagccgcgagagaatgaagcggatcgaagagggcatcaaagagctgggcagccagatcctgaaagaacaccccgtggaaaacacccagctgcagaacgagaagctgtacctgtactacctgcagaatgggcgggatatgtacgtggaccaggaactggacatcaaccggctgtccgactacgatgtggacgctatcgtgcctcagagctttctgaaggacgactccatcgacaacaaggtgctgaccagaagcgacaagaaccggggcaagagcgacaacgtgccctccgaagaggtcgtgaagaagatgaagaactactggcggcagctgctgaacgccaagctgattacccagagaaagttcgacaatctgaccaaggccgagagaggcggcctgagcgaactggataaggccggcttcatcaagagacagctggtggaaacccggcagatcacaaagcacgtggcacagatcctggactcccggatgaacactaagtacgacgagaatgacaagctgatccgggaagtgaaagtgatcaccctgaagtccaagctggtgtccgatttccggaaggatttccagttttacaaagtgcgcgagatcaacaactaccaccacgcccacgacgcctacctgaacgccgtcgtgggaaccgccctgatcaaaaagtaccctaagctggaaagcgagttcgtgtacggcgactacaaggtgtacgacgtgcggaagatgatcgccaagagcgagcaggaaatcggcaaggctaccgccaagtacttcttctacagcaacatcatgaactttttcaagaccgagattaccctggccaacggcgagatccggaagcggcctctgatcgagacaaacggcgaaaccggggagatcgtgtgggataagggccgggattttgccaccgtgcggaaagtgctgagcatgccccaagtgaatatcgtgaaaaagaccgaggtgcagacaggcggcttcagcaaagagtctatcctgcccaagaggaacagcgataagctgatcgccagaaagaaggactgggaccctaagaagtacggcggcttcgacagccccaccgtggcctattctgtgctggtggtggccaaagtggaaaagggcaagtccaagaaactgaagagtgtgaaagagctgctggggatcaccatcatggaaagaagcagcttcgagaagaatcccatcgactttctggaagccaagggctacaaagaagtgaaaaaggacctgatcatcaagctgcctaagtactccctgttcgagctggaaaacggccggaagagaatgctggcctctgccggcgaactgcagaagggaaacgaactggccctgccctccaaatatgtgaacttcctgtacctggccagccactatgagaagctgaagggctcccccgaggataatgagcagaaacagctgtttgtggaacagcacaagcactacctggacgagatcatcgagcagatcagcgagttctccaagagagtgatcctggccgacgctaatctggacaaagtgctgtccgcctacaacaagcaccgggataagcccatcagagagcaggccgagaatatcatccacctgtttaccctgaccaatctgggagcccctgccgccttcaagtactttgacaccaccatcgaccggaagaggtacaccagcaccaaagaggtgctggacgccaccctgatccaccagagcatcaccggcctgtacgagacacggatcgacctgtctcagctgggaggtgactccggcggcagcagcggatctgagacacccggcaccagcgaaagcgccacccctgagagcaccctgaacatcgaggacgagtacaggctgcacgagaccagcaaggagcccgacgtgagcctgggcagcacctggctgagcgatttccctcaggcttgggccgagaccggcggcatgggcctggccgtgcggcaggcccccctgattatccccctgaaggccaccagcacccccgtgagcatcaagcagtacccaatgtcccaggaggccaggctgggcatcaagcctcacatccagaggctgctggaccagggcatcctggtgccatgccagtccccctggaacacccctctgctgcccgtgaagaagcctggcaccaacgactaccggcccgtgcaggacctgagagaagtgaacaagcgggtggaggacatccacccaaccgtgcccaacccttacaacctgctgtccggcctgccccccagccaccagtggtacaccgtgctggacctgaaggacgccttcttctgcctgagactgcaccccacctctcagcccctgttcgccttcgagtggcgcgaccccgagatgggcatcagcggccagctgacctggaccagactgccacagggctttaagaatagcccaaccctgtttaacgaggccctgcacagggacctggccgacttcaggatccagcaccccgacctgattctgctgcagtacgtggacgacctgctgctggccgctaccagcgagctggactgccagcagggcaccagagccctgctgcagaccctgggcaacctgggctacagagccagcgccaagaaggcccagatctgtcagaagcaggtgaagtatctgggctacctgctgaaggaaggccagagatggctgaccgaggccagaaaggagactgtgatgggccagcccacccccaagacccccaggcagctgcgggagttcctgggcaaggccggcttttgcagactgtttatccctggcttcgccgagatggccgccccactgtaccctctgaccaagcctggcaccctgtttaactggggccccgaccagcagaaggcctaccaggagatcaagcaggccctgctgaccgcccccgccctgggcctgcccgacctgaccaagcctttcgagctgttcgtggacgagaagcagggatacgccaaaggcgtgctgacccagaagctgggcccctggcggaggcccgtggcctacctgagcaaaaaactggaccctgtggccgccggctggcccccatgcctgcggatggtggccgccatcgctgtgctgaccaaggacgccggcaagctgaccatgggccagcccctggtgatcctggcccctcacgccgtggaggctctggtgaagcagcctccagacaggtggctgtccaacgccaggatgacccactaccaggccctgctgctggacaccgaccgggtgcagttcggccctgtggtggccctgaaccccgccaccctgctgcctctgccagaggagggcctgcagcacaactgcctggacatcctggccgaggcccacggcaccaggcccgacctgaccgaccagcccctgcctgacgccgaccacacctggtacaccgacggcagctccctgctgcaggagggccagaggaaggccggcgccgccgtgaccaccgagaccgaggtgatctgggccaaagccctgcctgccggcacctccgcccagcgggccgagctgatcgccctgacccaggccctgaagatggctgagggcaagaagctgaacgtgtacaccgattccagatacgccttcgccaccgcccacatccacggcgagatctacagaagaaggggctggctgacctccgagggcaaggagatcaagaacaaggacgagattctggccctgctgaaggccctgttcctgcctaagagactgagcatcatccactgtcccggccaccagaagggccacagcgccgaggccagaggcaatagaatggccgaccaggccgccagaaaggccgccatcaccgagacccccgacaccagcaccctgctgatcgagaacagcagcccc

SEQ ID NO: 181 - RNA, 6192 nt, synthetic construct
  misc_feature 1..6192: note = Description of Artificial Sequence: Synthetic polynucleotide
  source 1..6192: mol_type = other RNA
gacaagaagtacagcatcggcctggacatcggcaccaactctgtgggctgggccgtgatcaccgacgagtacaaggtgcccagcaagaaattcaaggtgctgggcaacaccgaccggcacagcatcaagaagaacctgatcggagccctgctgttcgacagcggcgaaacagccgaggccacccggctgaagagaaccgccagaagaagatacaccagacggaagaaccggatctgctatctgcaagagatcttcagcaacgagatggccaaggtggacgacagcttcttccacagactggaagagtccttcctggtggaagaggataagaagcacgagcggcaccccatcttcggcaacatcgtggacgaggtggcctaccacgagaagtaccccaccatctaccacctgagaaagaaactggtggacagcaccgacaaggccgacctgcggctgatctatctggccctggcccacatgatcaagttccggggccacttcctgatcgagggcgacctgaaccccgacaacagcgacgtggacaagctgttcatccagctggtgcagacctacaaccagctgttcgaggaaaaccccatcaacgccagcggcgtggacgccaaggccatcctgtctgccagactgagcaagagcagacggctggaaaatctgatcgcccagctgcccggcgagaagaagaatggcctgttcggaaacctgattgccctgagcctgggcctgacccccaacttcaagagcaacttcgacctggccgaggatgccaaactgcagctgagcaaggacacctacgacgacgacctggacaacctgctggcccagatcggcgaccagtacgccgacctgtttctggccgccaagaacctgtccgacgccatcctgctgagcgacatcctgagagtgaacaccgagatcaccaaggcccccctgagcgcctctatgatcaagagatacgacgagcaccaccaggacctgaccctgctgaaagctctcgtgcggcagcagctgcctgagaagtacaaagagattttcttcgaccagagcaagaacggctacgccggctacattgacggcggagccagccaggaagagttctacaagttcatcaagcccatcctggaaaagatggacggcaccgaggaactgctcgtgaagctgaacagagaggacctgctgcggaagcagcggaccttcgacaacggcagcatcccccaccagatccacctgggagagctgcacgccattctgcggcggcaggaagatttttacccattcctgaaggacaaccgggaaaagatcgagaagatcctgaccttccgcatcccctactacgtgggccctctggccaggggaaacagcagattcgcctggatgaccagaaagagcgaggaaaccatcaccccctggaacttcgaggaagtggtggacaagggcgcttccgcccagagcttcatcgagcggatgaccaacttcgataagaacctgcccaacgagaaggtgctgcccaagcacagcctgctgtacgagtacttcaccgtgtataacgagctgaccaaagtgaaatacgtgaccgagggaatgagaaagcccgccttcctgagcggcgagcagaaaaaggccatcgtggacctgctgttcaagaccaaccggaaagtgaccgtgaagcagctgaaagaggactacttcaagaaaatcgagtgcttcgactccgtggaaatctccggcgtggaagatcggttcaacgcctccctgggcacataccacgatctgctgaaaattatcaaggacaaggacttcctggacaatgaggaaaacgaggacattctggaagatatcgtgctgaccctgacactgtttgaggacagagagatgatcgaggaacggctgaaaacctatgcccacctgttcgacgacaaagtgatgaagcagctgaagcggcggagatacaccggctggggcaggctgagccggaagctgatcaacggcatccgggacaagcagtccggcaagacaatcctggatttcctgaagtccgacggcttcgccaacagaaacttcatgcagctgatccacgacgacagcctgacctttaaagaggacatccagaaagcccaggtgtccggccagggcgatagcctgcacgagcacattgccaatctggccggcagccccgccattaagaagggcatcctgcagacagtgaaggtggtggacgagctcgtgaaagtgatgggccggcacaagcccgagaacatcgtgatcgaaatggccagagagaaccagaccacccagaagggacagaagaacagccgcgagagaatgaagcggatcgaagagggcatcaaagagctgggcagccagatcctgaaagaacaccccgtggaaaacacccagctgcagaacgagaagctgtacctgtactacctgcagaatgggcgggatatgtacgtggaccaggaactggacatcaaccggctgtccgactacgatgtggacgctatcgtgcctcagagctttctgaaggacgactccatcgacaacaaggtgctgaccagaagcgacaagaaccggggcaagagcgacaacgtgccctccgaagaggtcgtgaagaagatgaagaactactggcggcagctgctgaacgccaagctgattacccagagaaagttcgacaatctgaccaaggccgagagaggcggcctgagcgaactggataaggccggcttcatcaagagacagctggtggaaacccggcagatcacaaagcacgtggcacagatcctggactcccggatgaacactaagtacgacgagaatgacaagctgatccgggaagtgaaagtgatcaccctgaagtccaagctggtgtccgatttccggaaggatttccagttttacaaagtgcgcgagatcaacaactaccaccacgcccacgacgcctacctgaacgccgtcgtgggaaccgccctgatcaaaaagtaccctaagctggaaagcgagttcgtgtacggcgactacaaggtgtacgacgtgcggaagatgatcgccaagagcgagcaggaaatcggcaaggctaccgccaagtacttcttctacagcaacatcatgaactttttcaagaccgagattaccctggccaacggcgagatccggaagcggcctctgatcgagacaaacggcgaaaccggggagatcgtgtgggataagggccgggattttgccaccgtgcggaaagtgctgagcatgccccaagtgaatatcgtgaaaaagaccgaggtgcagacaggcggcttcagcaaagagtctatcctgcccaagaggaacagcgataagctgatcgccagaaagaaggactgggaccctaagaagtacggcggcttcgacagccccaccgtggcctattctgtgctggtggtggccaaagtggaaaagggcaagtccaagaaactgaagagtgtgaaagagctgctggggatcaccatcatggaaagaagcagcttcgagaagaatcccatcgactttctggaagccaagggctacaaagaagtgaaaaaggacctgatcatcaagctgcctaagtactccctgttcgagctggaaaacggccggaagagaatgctggcctctgccggcgaactgcagaagggaaacgaactggccctgccctccaaatatgtgaacttcctgtacctggccagccactatgagaagctgaagggctcccccgaggataatgagcagaaacagctgtttgtggaacagcacaagcactacctggacgagatcatcgagcagatcagcgagttctccaagagagtgatcctggccgacgctaatctggacaaagtgctgtccgcctacaacaagcaccgggataagcccatcagagagcaggccgagaatatcatccacctgtttaccctgaccaatctgggagcccctgccgccttcaagtactttgacaccaccatcgaccggaagaggtacaccagcaccaaagaggtgctggacgccaccctgatccaccagagcatcaccggcctgtacgagacacggatcgacctgtctcagctgggaggtgactccggcggcagcagcggatctgagacacccggcaccagcgaaagcgccacccctgagagcaccctgaacatcgaggacgagtacaggctgcacgagaccagcaaggagcccgacgtgagcctgggcagcacctggctgagcgatttccctcaggcttgggccgagaccggcggcatgggcctggccgtgcggcaggcccccctgattatccccctgaaggccaccagcacccccgtgagcatcaagcagtacccaatgtcccaggaggccaggctgggcatcaagcctcacatccagaggctgctggaccagggcatcctggtgccatgccagtccccctggaacacccctctgctgcccgtgaagaagcctggcaccaacgactaccggcccgtgcaggacctgagagaagtgaacaagcgggtggaggacatccacccaaccgtgcccaacccttacaacctgctgtccggcctgccccccagccaccagtggtacaccgtgctggacctgaaggacgccttcttctgcctgagactgcaccccacctctcagcccctgttcgccttcgagtggcgcgaccccgagatgggcatcagcggccagctgacctggaccagactgccacagggctttaagaatagcccaaccctgtttaacgaggccctgcacagggacctggccgacttcaggatccagcaccccgacctgattctgctgcagtacgtggacgacctgctgctggccgctaccagcgagctggactgccagcagggcaccagagccctgctgcagaccctgggcaacctgggctacagagccagcgccaagaaggcccagatctgtcagaagcaggtgaagtatctgggctacctgctgaaggaaggccagagatggctgaccgaggccagaaaggagactgtgatgggccagcccacccccaagacccccaggcagctgcgggagttcctgggcaaggccggcttttgcagactgtttatccctggcttcgccgagatggccgccccactgtaccctctgaccaagcctggcaccctgtttaactggggccccgaccagcagaaggcctaccaggagatcaagcaggccctgctgaccgcccccgccctgggcctgcccgacctgaccaagcctttcgagctgttcgtggacgagaagcagggatacgccaaaggcgtgctgacccagaagctgggcccctggcggaggcccgtggcctacctgagcaaaaaactggaccctgtggccgccggctggcccccatgcctgcggatggtggccgccatcgctgtgctgaccaaggacgccggcaagctgaccatgggccagcccctggtgatcctggcccctcacgccgtggaggctctggtgaagcagcctccagacaggtggctgtccaacgccaggatgacccactaccaggccctgctgctggacaccgaccgggtgcagttcggccctgtggtggccctgaaccccgccaccctgctgcctctgccagaggagggcctgcagcacaactgcctggacatcctggccgaggcccacggcaccaggcccgacctgaccgaccagcccctgcctgacgccgaccacacctggtacaccgacggcagctccctgctgcaggagggccagaggaaggccggcgccgccgtgaccaccgagaccgaggtgatctgggccaaagccctgcctgccggcacctccgcccagcgggccgagctgatcgccctgacccaggccctgaagatggctgagggcaagaagctgaacgtgtacaccgattccagatacgccttcgccaccgcccacatccacggcgagatctacagaagaaggggctggctgacctccgagggcaaggagatcaagaacaaggacgagattctggccctgctgaaggccctgttcctgcctaagagactgagcatcatccactgtcccggccaccagaagggccacagcgccgaggccagaggcaatagaatggccgaccaggccgccagaaaggccgccatcaccgagacccccgacaccagcaccctgctgatcgagaacagcagcccc

SEQ ID NO: 182 - protein, 1891 aa, synthetic construct
  REGION 1..1891: note = Description of Artificial Sequence: Synthetic polypeptide
DKKYSIGLDIGTNSVGWAVITDEYKVPSKKFKVLGNTDRHSIKKNLIGALLFDSGETAEATRLKRTARRRYTRRKNRICYLQEIFSNEMAKVDDSFFHRLEESFLVEEDKKHERHPIFGNIVDEVAYHEKYPTIYHLRKKLVDSTDKADLRLIYLALAHMIKFRGHFLIEGDLNPDNSDVDKLFIQLVQTYNQLFEENPINASGVDAKAILSARLSKSRRLENLIAQLPGEKKNGLFGNLIALSLGLTPNFKSNFDLAEDAKLQLSKDTYDDDLDNLLAQIGDQYADLFLAAKNLSDAILLSDILRVNTEITKAPLSASMIKRYDEHHQDLTLLKALVRQQLPEKYKEIFFDQSKNGYAGYIDGGASQEEFYKFIKPILEKMDGTEELLVKLNREDLLRKQRTFDNGSIPHQIHLGELHAILRRQEDFYPFLKDNREKIEKILTFRIPYYVGPLARGNSRFAWMTRKSEETITPWNFEEVVDKGASAQSFIERMTNFDKNLPNEKVLPKHSLLYEYFTVYNELTKVKYVTEGMRKPAFLSGEQKKAIVDLLFKTNRKVTVKQLKEDYFKKIECFDSVEISGVEDRFNASLGTYHDLLKIIKDKDFLDNEENEDILEDIVLTLTLFEDREMIEERLKTYAHLFDDKVMKQLKRRRYTGWGRLSRKLINGIRDKQSGKTILDFLKSDGFANRNFMQLIHDDSLTFKEDIQKAQVSGQGDSLHEHIANLAGSPAIKKGILQTVKVVDELVKVMGRHKPENIVIEMARENQTTQKGQKNSRERMKRIEEGIKELGSQILKEHPVENTQLQNEKLYLYYLQNGRDMYVDQELDINRLSDYDVDAIVPQSFLKDDSIDNKVLTRSDKNRGKSDNVPSEEVVKKMKNYWRQLLNAKLITQRKFDNLTKAERGGLSELDKAGFIKRQLVETRQITKHVAQILDSRMNTKYDENDKLIREVKVITLKSKLVSDFRKDFQFYKVREINNYHHAHDAYLNAVVGTALIKKYPKLESEFVYGDYKVYDVRKMIAKSEQEIGKATAKYFFYSNIMNFFKTEITLANGEIRKRPLIETNGETGEIVWDKGRDFATVRKVLSMPQVNIVKKTEVQTGGFSKESILPKRNSDKLIARKKDWDPKKYGGFDSPTVAYSVLVVAKVEKGKSKKLKSVKELLGITIMERSSFEKNPIDFLEAKGYKEVKKDLIIKLPKYSLFELENGRKRMLASAGELQKGNELALPSKYVNFLYLASHYEKLKGSPEDNEQKQLFVEQHKHYLDEIIEQISEFSKRVILADANLDKVLSAYNKHRDKPIREQAENIIHLFTLTNLGAPAAFKYFDTTIDRKRYTSTKEVLDATLIHQSITGLYETRIDLSQLGGDSGGSSGSETPGTSESATPESTLNIEDEYRLHETSKEPDVSLGSTWLSDFPQAWAETGGMGLAVRQAPLIIPLKATSTPVSIKQYPMSQEARLGIKPHIQRLLDQGILVPCQSPWNTPLLPVKKPGTNDYRPVQDLREVNKRVEDIHPTVPNPYNLLSGLPPSHQWYTVLDLKDAFFCLRLHPTSQPLFAFEWRDPEMGISGQLTWTRLPQGFKNSPTLFNEALHRDLADFRIQHPDLILLQYVDDLLLAATSELDCQQGTRALLQTLGNLGYRASAKKAQICQKQVKYLGYLLKEGQRWLTEARKETVMGQPTPKTPRQLREFLGKAGFCRLFIPGFAEMAAPLYPLTKPGTLFNWGPDQQKAYQEIKQALLTAPALGLPDLTKPFELFVDEKQGYAKGVLTQKLGPWRRPVAYLSKKLDPVAAGWPPCLRMVAAIAVLTKDAGKLTMGQPLVILAPHAVEALVKQPPDRWLSNARMTHYQALLLDTDRVQFGPVVALNPATLLPLPEEGLQHNCLDILAEAHG

SEQ ID NO: 183 - DNA, 5673 bp, synthetic construct
  misc_feature 1..5673: note = Description of Artificial Sequence: Synthetic polynucleotide
  source 1..5673: mol_type = other DNA
gacaagaagtacagcatcggcctggacatcggcaccaactctgtgggctgggccgtgatcaccgacgagtacaaggtgcccagcaagaaattcaaggtgctgggcaacaccgaccggcacagcatcaagaagaacctgatcggagccctgctgttcgacagcggcgaaacagccgaggccacccggctgaagagaaccgccagaagaagatacaccagacggaagaaccggatctgctatctgcaagagatcttcagcaacgagatggccaaggtggacgacagcttcttccacagactggaagagtccttcctggtggaagaggataagaagcacgagcggcaccccatcttcggcaacatcgtggacgaggtggcctaccacgagaagtaccccaccatctaccacctgagaaagaaactggtggacagcaccgacaaggccgacctgcggctgatctatctggccctggcccacatgatcaagttccggggccacttcctgatcgagggcgacctgaaccccgacaacagcgacgtggacaagctgttcatccagctggtgcagacctacaaccagctgttcgaggaaaaccccatcaacgccagcggcgtggacgccaaggccatcctgtctgccagactgagcaagagcagacggctggaaaatctgatcgcccagctgcccggcgagaagaagaatggcctgttcggaaacctgattgccctgagcctgggcctgacccccaacttcaagagcaacttcgacctggccgaggatgccaaactgcagctgagcaaggacacctacgacgacgacctggacaacctgctggcccagatcggcgaccagtacgccgacctgtttctggccgccaagaacctgtccgacgccatcctgctgagcgacatcctgagagtgaacaccgagatcaccaaggcccccctgagcgcctctatgatcaagagatacgacgagcaccaccaggacctgaccctgctgaaagctctcgtgcggcagcagctgcctgagaagtacaaagagattttcttcgaccagagcaagaacggctacgccggctacattgacggcggagccagccaggaagagttctacaagttcatcaagcccatcctggaaaagatggacggcaccgaggaactgctcgtgaagctgaacagagaggacctgctgcggaagcagcggaccttcgacaacggcagcatcccccaccagatccacctgggagagctgcacgccattctgcggcggcaggaagatttttacccattcctgaaggacaaccgggaaaagatcgagaagatcctgaccttccgcatcccctactacgtgggccctctggccaggggaaacagcagattcgcctggatgaccagaaagagcgaggaaaccatcaccccctggaacttcgaggaagtggtggacaagggcgcttccgcccagagcttcatcgagcggatgaccaacttcgataagaacctgcccaacgagaaggtgctgcccaagcacagcctgctgtacgagtacttcaccgtgtataacgagctgaccaaagtgaaatacgtgaccgagggaatgagaaagcccgccttcctgagcggcgagcagaaaaaggccatcgtggacctgctgttcaagaccaaccggaaagtgaccgtgaagcagctgaaagaggactacttcaagaaaatcgagtgcttcgactccgtggaaatctccggcgtggaagatcggttcaacgcctccctgggcacataccacgatctgctgaaaattatcaaggacaaggacttcctggacaatgaggaaaacgaggacattctggaagatatcgtgctgaccctgacactgtttgaggacagagagatgatcgaggaacggctgaaaacctatgcccacctgttcgacgacaaagtgatgaagcagctgaagcggcggagatacaccggctggggcaggctgagccggaagctgatcaacggcatccgggacaagcagtccggcaagacaatcctggatttcctgaagtccgacggcttcgccaacagaaacttcatgcagctgatccacgacgacagcctgacctttaaagaggacatccagaaagcccaggtgtccggccagggcgatagcctgcacgagcacattgccaatctggccggcagccccgccattaagaagggcatcctgcagacagtgaaggtggtggacgagctcgtgaaagtgatgggccggcacaagcccgagaacatcgtgatcgaaatggccagagagaaccagaccacccagaagggacagaagaacagccgcgagagaatgaagcggatcgaagagggcatcaaagagctgggcagccagatcctgaaagaacaccccgtggaaaacacccagctgcagaacgagaagctgtacctgtactacctgcagaatgggcgggatatgtacgtggaccaggaactggacatcaaccggctgtccgactacgatgtggacgctatcgtgcctcagagctttctgaaggacgactccatcgacaacaaggtgctgaccagaagcgacaagaaccggggcaagagcgacaacgtgccctccgaagaggtcgtgaagaagatgaagaactactggcggcagctgctgaacgccaagctgattacccagagaaagttcgacaatctgaccaaggccgagagaggcggcctgagcgaactggataaggccggcttcatcaagagacagctggtggaaacccggcagatcacaaagcacgtggcacagatcctggactcccggatgaacactaagtacgacgagaatgacaagctgatccgggaagtgaaagtgatcaccctgaagtccaagctggtgtccgatttccggaaggatttccagttttacaaagtgcgcgagatcaacaactaccaccacgcccacgacgcctacctgaacgccgtcgtgggaaccgccctgatcaaaaagtaccctaagctggaaagcgagttcgtgtacggcgactacaaggtgtacgacgtgcggaagatgatcgccaagagcgagcaggaaatcggcaaggctaccgccaagtacttcttctacagcaacatcatgaactttttcaagaccgagattaccctggccaacggcgagatccggaagcggcctctgatcgagacaaacggcgaaaccggggagatcgtgtgggataagggccgggattttgccaccgtgcggaaagtgctgagcatgccccaagtgaatatcgtgaaaaagaccgaggtgcagacaggcggcttcagcaaagagtctatcctgcccaagaggaacagcgataagctgatcgccagaaagaaggactgggaccctaagaagtacggcggcttcgacagccccaccgtggcctattctgtgctggtggtggccaaagtggaaaagggcaagtccaagaaactgaagagtgtgaaagagctgctggggatcaccatcatggaaagaagcagcttcgagaagaatcccatcgactttctggaagccaagggctacaaagaagtgaaaaaggacctgatcatcaagctgcctaagtactccctgttcgagctggaaaacggccggaagagaatgctggcctctgccggcgaactgcagaagggaaacgaactggccctgccctccaaatatgtgaacttcctgtacctggccagccactatgagaagctgaagggctcccccgaggataatgagcagaaacagctgtttgtggaacagcacaagcactacctggacgagatcatcgagcagatcagcgagttctccaagagagtgatcctggccgacgctaatctggacaaagtgctgtccgcctacaacaagcaccgggataagcccatcagagagcaggccgagaatatcatccacctgtttaccctgaccaatctgggagcccctgccgccttcaagtactttgacaccaccatcgaccggaagaggtacaccagcaccaaagaggtgctggacgccaccctgatccaccagagcatcaccggcctgtacgagacacggatcgacctgtctcagctgggaggtgactccggcggcagcagcggatctgagacacccggcaccagcgaaagcgccacccctgagagcaccctgaacatcgaggacgagtacaggctgcacgagaccagcaaggagcccgacgtgagcctgggcagcacctggctgagcgatttccctcaggcttgggccgagaccggcggcatgggcctggccgtgcggcaggcccccctgattatccccctgaaggccaccagcacccccgtgagcatcaagcagtacccaatgtcccaggaggccaggctgggcatcaagcctcacatccagaggctgctggaccagggcatcctggtgccatgccagtccccctggaacacccctctgctgcccgtgaagaagcctggcaccaacgactaccggcccgtgcaggacctgagagaagtgaacaagcgggtggaggacatccacccaaccgtgcccaacccttacaacctgctgtccggcctgccccccagccaccagtggtacaccgtgctggacctgaaggacgccttcttctgcctgagactgcaccccacctctcagcccctgttcgccttcgagtggcgcgaccccgagatgggcatcagcggccagctgacctggaccagactgccacagggctttaagaatagcccaaccctgtttaacgaggccctgcacagggacctggccgacttcaggatccagcaccccgacctgattctgctgcagtacgtggacgacctgctgctggccgctaccagcgagctggactgccagcagggcaccagagccctgctgcagaccctgggcaacctgggctacagagccagcgccaagaaggcccagatctgtcagaagcaggtgaagtatctgggctacctgctgaaggaaggccagagatggctgaccgaggccagaaaggagactgtgatgggccagcccacccccaagacccccaggcagctgcgggagttcctgggcaaggccggcttttgcagactgtttatccctggcttcgccgagatggccgccccactgtaccctctgaccaagcctggcaccctgtttaactggggccccgaccagcagaaggcctaccaggagatcaagcaggccctgctgaccgcccccgccctgggcctgcccgacctgaccaagcctttcgagctgttcgtggacgagaagcagggatacgccaaaggcgtgctgacccagaagctgggcccctggcggaggcccgtggcctacctgagcaaaaaactggaccctgtggccgccggctggcccccatgcctgcggatggtggccgccatcgctgtgctgaccaaggacgccggcaagctgaccatgggccagcccctggtgatcctggcccctcacgccgtggaggctctggtgaagcagcctccagacaggtggctgtccaacgccaggatgacccactaccaggccctgctgctggacaccgaccgggtgcagttcggccctgtggtggccctgaaccccgccaccctgctgcctctgccagaggagggcctgcagcacaactgcctggacatcctggccgaggcccacggc

SEQ ID NO: 184 - RNA, 5673 nt, synthetic construct
  misc_feature 1..5673: note = Description of Artificial Sequence: Synthetic polynucleotide
  source 1..5673: mol_type = other RNA
gacaagaagtacagcatcggcctggacatcggcaccaactctgtgggctgggccgtgatcaccgacgagtacaaggtgcccagcaagaaattcaaggtgctgggcaacaccgaccggcacagcatcaagaagaacctgatcggagccctgctgttcgacagcggcgaaacagccgaggccacccggctgaagagaaccgccagaagaagatacaccagacggaagaaccggatctgctatctgcaagagatcttcagcaacgagatggccaaggtggacgacagcttcttccacagactggaagagtccttcctggtggaagaggataagaagcacgagcggcaccccatcttcggcaacatcgtggacgaggtggcctaccacgagaagtaccccaccatctaccacctgagaaagaaactggtggacagcaccgacaaggccgacctgcggctgatctatctggccctggcccacatgatcaagttccggggccacttcctgatcgagggcgacctgaaccccgacaacagcgacgtggacaagctgttcatccagctggtgcagacctacaaccagctgttcgaggaaaaccccatcaacgccagcggcgtggacgccaaggccatcctgtctgccagactgagcaagagcagacggctggaaaatctgatcgcccagctgcccggcgagaagaagaatggcctgttcggaaacctgattgccctgagcctgggcctgacccccaacttcaagagcaacttcgacctggccgaggatgccaaactgcagctgagcaaggacacctacgacgacgacctggacaacctgctggcccagatcggcgaccagtacgccgacctgtttctggccgccaagaacctgtccgacgccatcctgctgagcgacatcctgagagtgaacaccgagatcaccaaggcccccctgagcgcctctatgatcaagagatacgacgagcaccaccaggacctgaccctgctgaaagctctcgtgcggcagcagctgcctgagaagtacaaagagattttcttcgaccagagcaagaacggctacgccggctacattgacggcggagccagccaggaagagttctacaagttcatcaagcccatcctggaaaagatggacggcaccgaggaactgctcgtgaagctgaacagagaggacctgctgcggaagcagcggaccttcgacaacggcagcatcccccaccagatccacctgggagagctgcacgccattctgcggcggcaggaagatttttacccattcctgaaggacaaccgggaaaagatcgagaagatcctgaccttccgcatcccctactacgtgggccctctggccaggggaaacagcagattcgcctggatgaccagaaagagcgaggaaaccatcaccccctggaacttcgaggaagtggtggacaagggcgcttccgcccagagcttcatcgagcggatgaccaacttcgataagaacctgcccaacgagaaggtgctgcccaagcacagcctgctgtacgagtacttcaccgtgtataacgagctgaccaaagtgaaatacgtgaccgagggaatgagaaagcccgccttcctgagcggcgagcagaaaaaggccatcgtggacctgctgttcaagaccaaccggaaagtgaccgtgaagcagctgaaagaggactacttcaagaaaatcgagtgcttcgactccgtggaaatctccggcgtggaagatcggttcaacgcctccctgggcacataccacgatctgctgaaaattatcaaggacaaggacttcctggacaatgaggaaaacgaggacattctggaagatatcgtgctgaccctgacactgtttgaggacagagagatgatcgaggaacggctgaaaacctatgcccacctgttcgacgacaaagtgatgaagcagctgaagcggcggagatacaccggctggggcaggctgagccggaagctgatcaacggcatccgggacaagcagtccggcaagacaatcctggatttcctgaagtccgacggcttcgccaacagaaacttcatgcagctgatccacgacgacagcctgacctttaaagaggacatccagaaagcccaggtgtccggccagggcgatagcctgcacgagcacattgccaatctggccggcagccccgccattaagaagggcatcctgcagacagtgaaggtggtggacgagctcgtgaaagtgatgggccggcacaagcccgagaacatcgtgatcgaaatggccagagagaaccagaccacccagaagggacagaagaacagccgcgagagaatgaagcggatcgaagagggcatcaaagagctgggcagccagatcctgaaagaacaccccgtggaaaacacccagctgcagaacgagaagctgtacctgtactacctgcagaatgggcgggatatgtacgtggaccaggaactggacatcaaccggctgtccgactacgatgtggacgctatcgtgcctcagagctttctgaaggacgactccatcgacaacaaggtgctgaccagaagcgacaagaaccggggcaagagcgacaacgtgccctccgaagaggtcgtgaagaagatgaagaactactggcggcagctgctgaacgccaagctgattacccagagaaagttcgacaatctgaccaaggccgagagaggcggcctgagcgaactggataaggccggcttcatcaagagacagctggtggaaacccggcagatcacaaagcacgtggcacagatcctggactcccggatgaacactaagtacgacgagaatgacaagctgatccgggaagtgaaagtgatcaccctgaagtccaagctggtgtccgatttccggaaggatttccagttttacaaagtgcgcgagatcaacaactaccaccacgcccacgacgcctacctgaacgccgtcgtgggaaccgccctgatcaaaaagtaccctaagctggaaagcgagttcgtgtacggcgactacaaggtgtacgacgtgcggaagatgatcgccaagagcgagcaggaaatcggcaaggctaccgccaagtacttcttctacagcaacatcatgaactttttcaagaccgagattaccctggccaacggcgagatccggaagcggcctctgatcgagacaaacggcgaaaccggggagatcgtgtgggataagggccgggattttgccaccgtgcggaaagtgctgagcatgccccaagtgaatatcgtgaaaaagaccgaggtgcagacaggcggcttcagcaaagagtctatcctgcccaagaggaacagcgataagctgatcgccagaaagaaggactgggaccctaagaagtacggcggcttcgacagccccaccgtggcctattctgtgctggtggtggccaaagtggaaaagggcaagtccaagaaactgaagagtgtgaaagagctgctggggatcaccatcatggaaagaagcagcttcgagaagaatcccatcgactttctggaagccaagggctacaaagaagtgaaaaaggacctgatcatcaagctgcctaagtactccctgttcgagctggaaaacggccggaagagaatgctggcctctgccggcgaactgcagaagggaaacgaactggccctgccctccaaatatgtgaacttcctgtacctggccagccactatgagaagctgaagggctcccccgaggataatgagcagaaacagctgtttgtggaacagcacaagcactacctggacgagatcatcgagcagatcagcgagttctccaagagagtgatcctggccgacgctaatctggacaaagtgctgtccgcctacaacaagcaccgggataagcccatcagagagcaggccgagaatatcatccacctgtttaccctgaccaatctgggagcccctgccgccttcaagtactttgacaccaccatcgaccggaagaggtacaccagcaccaaagaggtgctggacgccaccctgatccaccagagcatcaccggcctgtacgagacacggatcgacctgtctcagctgggaggtgactccggcggcagcagcggatctgagacacccggcaccagcgaaagcgccacccctgagagcaccctgaacatcgaggacgagtacaggctgcacgagaccagcaaggagcccgacgtgagcctgggcagcacctggctgagcgatttccctcaggcttgggccgagaccggcggcatgggcctggccgtgcggcaggcccccctgattatccccctgaaggccaccagcacccccgtgagcatcaagcagtacccaatgtcccaggaggccaggctgggcatcaagcctcacatccagaggctgctggaccagggcatcctggtgccatgccagtccccctggaacacccctctgctgcccgtgaagaagcctggcaccaacgactaccggcccgtgcaggacctgagagaagtgaacaagcgggtggaggacatccacccaaccgtgcccaacccttacaacctgctgtccggcctgccccccagccaccagtggtacaccgtgctggacctgaaggacgccttcttctgcctgagactgcaccccacctctcagcccctgttcgccttcgagtggcgcgaccccgagatgggcatcagcggccagctgacctggaccagactgccacagggctttaagaatagcccaaccctgtttaacgaggccctgcacagggacctggccgacttcaggatccagcaccccgacctgattctgctgcagtacgtggacgacctgctgctggccgctaccagcgagctggactgccagcagggcaccagagccctgctgcagaccctgggcaacctgggctacagagccagcgccaagaaggcccagatctgtcagaagcaggtgaagtatctgggctacctgctgaaggaaggccagagatggctgaccgaggccagaaaggagactgtgatgggccagcccacccccaagacccccaggcagctgcgggagttcctgggcaaggccggcttttgcagactgtttatccctggcttcgccgagatggccgccccactgtaccctctgaccaagcctggcaccctgtttaactggggccccgaccagcagaaggcctaccaggagatcaagcaggccctgctgaccgcccccgccctgggcctgcccgacctgaccaagcctttcgagctgttcgtggacgagaagcagggatacgccaaaggcgtgctgacccagaagctgggcccctggcggaggcccgtggcctacctgagcaaaaaactggaccctgtggccgccggctggcccccatgcctgcggatggtggccgccatcgctgtgctgaccaaggacgccggcaagctgaccatgggccagcccctggtgatcctggcccctcacgccgtggaggctctggtgaagcagcctccagacaggtggctgtccaacgccaggatgacccactaccaggccctgctgctggacaccgaccgggtgcagttcggccctgtggtggccctgaaccccgccaccctgctgcctctgccagaggagggcctgcagcacaactgcctggacatcctggccgaggcccacggc

SEQ ID NO: 185 - protein, 2068 aa, synthetic construct
  REGION 1..2068: note = Description of Artificial Sequence: Synthetic polypeptide
DKKYSIGLDIGTNSVGWAVITDEYKVPSKKFKVLGNTDRHSIKKNLIGALLFDSGETAEATRLKRTARRRYTRRKNRICYLQEIFSNEMAKVDDSFFHRLEESFLVEEDKKHERHPIFGNIVDEVAYHEKYPTIYHLRKKLVDSTDKADLRLIYLALAHMIKFRGHFLIEGDLNPDNSDVDKLFIQLVQTYNQLFEENPINASGVDAKAILSARLSKSRRLENLIAQLPGEKKNGLFGNLIALSLGLTPNFKSNFDLAEDAKLQLSKDTYDDDLDNLLAQIGDQYADLFLAAKNLSDAILLSDILRVNTEITKAPLSASMIKRYDEHHQDLTLLKALVRQQLPEKYKEIFFDQSKNGYAGYIDGGASQEEFYKFIKPILEKMDGTEELLVKLNREDLLRKQRTFDNGSIPHQIHLGELHAILRRQEDFYPFLKDNREKIEKILTFRIPYYVGPLARGNSRFAWMTRKSEETITPWNFEEVVDKGASAQSFIERMTNFDKNLPNEKVLPKHSLLYEYFTVYNELTKVKYVTEGMRKPAFLSGEQKKAIVDLLFKTNRKVTVKQLKEDYFKKIECFDSVEISGVEDRFNASLGTYHDLLKIIKDKDFLDNEENEDILEDIVLTLTLFEDREMIEERLKTYAHLFDDKVMKQLKRRRYTGWGRLSRKLINGIRDKQSGKTILDFLKSDGFANRNFMQLIHDDSLTFKEDIQKAQVSGQGDSLHEHIANLAGSPAIKKGILQTVKVVDELVKVMGRHKPENIVIEMARENQTTQKGQKNSRERMKRIEEGIKELGSQILKEHPVENTQLQNEKLYLYYLQNGRDMYVDQELDINRLSDYDVDAIVPQSFLKDDSIDNKVLTRSDKNRGKSDNVPSEEVVKKMKNYWRQLLNAKLITQRKFDNLTKAERGGLSELDKAGFIKRQLVETRQITKHVAQILDSRMNTKYDENDKLIREVKVITLKSKLVSDFRKDFQFYKVREINNYHHAHDAYLNAVVGTALIKKYPKLESEFVYGDYKVYDVRKMIAKSEQEIGKATAKYFFYSNIMNFFKTEITLANGEIRKRPLIETNGETGEIVWDKGRDFATVRKVLSMPQVNIVKKTEVQTGGFSKESILPKRNSDKLIARKKDWDPKKYGGFDSPTVAYSVLVVAKVEKGKSKKLKSVKELLGITIMERSSFEKNPIDFLEAKGYKEVKKDLIIKLPKYSLFELENGRKRMLASAGELQKGNELALPSKYVNFLYLASHYEKLKGSPEDNEQKQLFVEQHKHYLDEIIEQISEFSKRVILADANLDKVLSAYNKHRDKPIREQAENIIHLFTLTNLGAPAAFKYFDTTIDRKRYTSTKEVLDATLIHQSITGLYETRIDLSQLGGDSGGSSGSETPGTSESATPESSGGSTLNIEDEYRLHETSKEPDVSLGSTWLSDFPQAWAETGGMGLAVRQAPLIIPLKATSTPVSIKQYPMSQEARLGIKPHIQRLLDQGILVPCQSPWNTPLLPVKKPGTNDYRPVQDLREVNKRVEDIHPTVPNPYNLLSGLPPSHQWYTVLDLKDAFFCLRLHPTSQPLFAFEWRDPEMGISGQLTWTRLPQGFKNSPTLFNEALHRDLADFRIQHPDLILLQYVDDLLLAATSELDCQQGTRALLQTLGNLGYRASAKKAQICQKQVKYLGYLLKEGQRWLTEARKETVMGQPTPKTPRQLREFLGKAGFCRLFIPGFAEMAAPLYPLTKPGTLFNWGPDQQKAYQEIKQALLTAPALGLPDLTKPFELFVDEKQGYAKGVLTQKLGPWRRPVAYLSKKLDPVAAGWPPCLRMVAAIAVLTKDAGKLTMGQPLVILAPHAVEALVKQPPDRWLSNARMTHYQALLLDTDRVQFGPVVALNPATLLPLPEEGLQHNCLDILAEAHGTRPDLTDQPLPDADHTWYTDGSSLLQEGQRKAGAAVTTETEVIWAKALPAGTSAQRAELIALTQALKMAEGKKLNVYTDSRYAFATAHIHGEIYRRRGWLTSEGKEIKNKDEILALLKALFLPKRLSIIHCPGHQKGHSAEARGNRMADQAARKAAITETPDTSTLLIENSSP

SEQ ID NO: 186 - DNA, 6204 bp, synthetic construct
  misc_feature 1..6204: note = Description of Artificial Sequence: Synthetic polynucleotide
  source 1..6204: mol_type = other DNA
gacaagaagtacagcatcggcctggacatcggcaccaactctgtgggctgggccgtgatcaccgacgagtacaaggtgcccagcaagaaattcaaggtgctgggcaacaccgaccggcacagcatcaagaagaacctgatcggagccctgctgttcgacagcggcgaaacagccgaggccacccggctgaagagaaccgccagaagaagatacaccagacggaagaaccggatctgctatctgcaagagatcttcagcaacgagatggccaaggtggacgacagcttcttccacagactggaagagtccttcctggtggaagaggataagaagcacgagcggcaccccatcttcggcaacatcgtggacgaggtggcctaccacgagaagtaccccaccatctaccacctgagaaagaaactggtggacagcaccgacaaggccgacctgcggctgatctatctggccctggcccacatgatcaagttccggggccacttcctgatcgagggcgacctgaaccccgacaacagcgacgtggacaagctgttcatccagctggtgcagacctacaaccagctgttcgaggaaaaccccatcaacgccagcggcgtggacgccaaggccatcctgtctgccagactgagcaagagcagacggctggaaaatctgatcgcccagctgcccggcgagaagaagaatggcctgttcggaaacctgattgccctgagcctgggcctgacccccaacttcaagagcaacttcgacctggccgaggatgccaaactgcagctgagcaaggacacctacgacgacgacctggacaacctgctggcccagatcggcgaccagtacgccgacctgtttctggccgccaagaacctgtccgacgccatcctgctgagcgacatcctgagagtgaacaccgagatcaccaaggcccccctgagcgcctctatgatcaagagatacgacgagcaccaccaggacctgaccctgctgaaagctctcgtgcggcagcagctgcctgagaagtacaaagagattttcttcgaccagagcaagaacggctacgccggctacattgacggcggagccagccaggaagagttctacaagttcatcaagcccatcctggaaaagatggacggcaccgaggaactgctcgtgaagctgaacagagaggacctgctgcggaagcagcggaccttcgacaacggcagcatcccccaccagatccacctgggagagctgcacgccattctgcggcggcaggaagatttttacccattcctgaaggacaaccgggaaaagatcgagaagatcctgaccttccgcatcccctactacgtgggccctctggccaggggaaacagcagattcgcctggatgaccagaaagagcgaggaaaccatcaccccctggaacttcgaggaagtggtggacaagggcgcttccgcccagagcttcatcgagcggatgaccaacttcgataagaacctgcccaacgagaaggtgctgcccaagcacagcctgctgtacgagtacttcaccgtgtataacgagctgaccaaagtgaaatacgtgaccgagggaatgagaaagcccgccttcctgagcggcgagcagaaaaaggccatcgtggacctgctgttcaagaccaaccggaaagtgaccgtgaagcagctgaaagaggactacttcaagaaaatcgagtgcttcgactccgtggaaatctccggcgtggaagatcggttcaacgcctccctgggcacataccacgatctgctgaaaattatcaaggacaaggacttcctggacaatgaggaaaacgaggacattctggaagatatcgtgctgaccctgacactgtttgaggacagagagatgatcgaggaacggctgaaaacctatgcccacctgttcgacgacaaagtgatgaagcagctgaagcggcggagatacaccggctggggcaggctgagccggaagctgatcaacggcatccgggacaagcagtccggcaagacaatcctggatttcctgaagtccgacggcttcgccaacagaaacttcatgcagctgatccacgacgacagcctgacctttaaagaggacatccagaaagcccaggtgtccggccagggcgatagcctgcacgagcacattgccaatctggccggcagccccgccattaagaagggcatcctgcagacagtgaaggtggtggacgagctcgtgaaagtgatgggccggcacaagcccgagaacatcgtgatcgaaatggccagagagaaccagaccacccagaagggacagaagaacagccgcgagagaatgaagcggatcgaagagggcatcaaagagctgggcagccagatcctgaaagaacaccccgtggaaaacacccagctgcagaacgagaagctgtacctgtactacctgcagaatgggcgggatatgtacgtggaccaggaactggacatcaaccggctgtccgactacgatgtggacgctatcgtgcctcagagctttctgaaggacgactccatcgacaacaaggtgctgaccagaagcgacaagaaccggggcaagagcgacaacgtgccctccgaagaggtcgtgaagaagatgaagaactactggcggcagctgctgaacgccaagctgattacccagagaaagttcgacaatctgaccaaggccgagagaggcggcctgagcgaactggataaggccggcttcatcaagagacagctggtggaaacccggcagatcacaaagcacgtggcacagatcctggactcccggatgaacactaagtacgacgagaatgacaagctgatccgggaagtgaaagtgatcaccctgaagtccaagctggtgtccgatttccggaaggatttccagttttacaaagtgcgcgagatcaacaactaccaccacgcccacgacgcctacctgaacgccgtcgtgggaaccgccctgatcaaaaagtaccctaagctggaaagcgagttcgtgtacggcgactacaaggtgtacgacgtgcggaagatgatcgccaagagcgagcaggaaatcggcaaggctaccgccaagtacttcttctacagcaacatcatgaactttttcaagaccgagattaccctggccaacggcgagatccggaagcggcctctgatcgagacaaacggcgaaaccggggagatcgtgtgggataagggccgggattttgccaccgtgcggaaagtgctgagcatgccccaagtgaatatcgtgaaaaagaccgaggtgcagacaggcggcttcagcaaagagtctatcctgcccaagaggaacagcgataagctgatcgccagaaagaaggactgggaccctaagaagtacggcggcttcgacagccccaccgtggcctattctgtgctggtggtggccaaagtggaaaagggcaagtccaagaaactgaagagtgtgaaagagctgctggggatcaccatcatggaaagaagcagcttcgagaagaatcccatcgactttctggaagccaagggctacaaagaagtgaaaaaggacctgatcatcaagctgcctaagtactccctgttcgagctggaaaacggccggaagagaatgctggcctctgccggcgaactgcagaagggaaacgaactggccctgccctccaaatatgtgaacttcctgtacctggccagccactatgagaagctgaagggctcccccgaggataatgagcagaaacagctgtttgtggaacagcacaagcactacctggacgagatcatcgagcagatcagcgagttctccaagagagtgatcctggccgacgctaatctggacaaagtgctgtccgcctacaacaagcaccgggataagcccatcagagagcaggccgagaatatcatccacctgtttaccctgaccaatctgggagcccctgccgccttcaagtactttgacaccaccatcgaccggaagaggtacaccagcaccaaagaggtgctggacgccaccctgatccaccagagcatcaccggcctgtacgagacacggatcgacctgtctcagctgggaggtgactccggcggatctagcggcagcgagacacccggcaccagcgaaagcgccacccctgagagcagcggcggctctaccctgaacatcgaggacgagtacaggctgcacgagaccagcaaggagcccgacgtgagcctgggcagcacctggctgagcgatttccctcaggcttgggccgagaccggcggcatgggcctggccgtgcggcaggcccccctgattatccccctgaaggccaccagcacccccgtgagcatcaagcagtacccaatgtcccaggaggccaggctgggcatcaagcctcacatccagaggctgctggaccagggcatcctggtgccatgccagtccccctggaacacccctctgctgcccgtgaagaagcctggcaccaacgactaccggcccgtgcaggacctgagagaagtgaacaagcgggtggaggacatccacccaaccgtgcccaacccttacaacctgctgtccggcctgccccccagccaccagtggtacaccgtgctggacctgaaggacgccttcttctgcctgagactgcaccccacctctcagcccctgttcgccttcgagtggcgcgaccccgagatgggcatcagcggccagctgacctggaccagactgccacagggctttaagaatagcccaaccctgtttaacgaggccctgcacagggacctggccgacttcaggatccagcaccccgacctgattctgctgcagtacgtggacgacctgctgctggccgctaccagcgagctggactgccagcagggcaccagagccctgctgcagaccctgggcaacctgggctacagagccagcgccaagaaggcccagatctgtcagaagcaggtgaagtatctgggctacctgctgaaggaaggccagagatggctgaccgaggccagaaaggagactgtgatgggccagcccacccccaagacccccaggcagctgcgggagttcctgggcaaggccggcttttgcagactgtttatccctggcttcgccgagatggccgccccactgtaccctctgaccaagcctggcaccctgtttaactggggccccgaccagcagaaggcctaccaggagatcaagcaggccctgctgaccgcccccgccctgggcctgcccgacctgaccaagcctttcgagctgttcgtggacgagaagcagggatacgccaaaggcgtgctgacccagaagctgggcccctggcggaggcccgtggcctacctgagcaaaaaactggaccctgtggccgccggctggcccccatgcctgcggatggtggccgccatcgctgtgctgaccaaggacgccggcaagctgaccatgggccagcccctggtgatcctggcccctcacgccgtggaggctctggtgaagcagcctccagacaggtggctgtccaacgccaggatgacccactaccaggccctgctgctggacaccgaccgggtgcagttcggccctgtggtggccctgaaccccgccaccctgctgcctctgccagaggagggcctgcagcacaactgcctggacatcctggccgaggcccacggcaccaggcccgacctgaccgaccagcccctgcctgacgccgaccacacctggtacaccgacggcagctccctgctgcaggagggccagaggaaggccggcgccgccgtgaccaccgagaccgaggtgatctgggccaaagccctgcctgccggcacctccgcccagcgggccgagctgatcgccctgacccaggccctgaagatggctgagggcaagaagctgaacgtgtacaccgattccagatacgccttcgccaccgcccacatccacggcgagatctacagaagaaggggctggctgacctccgagggcaaggagatcaagaacaaggacgagattctggccctgctgaaggccctgttcctgcctaagagactgagcatcatccactgtcccggccaccagaagggccacagcgccgaggccagaggcaatagaatggccgaccaggccgccagaaaggccgccatcaccgagacccccgacaccagcaccctgctgatcgagaacagcagcccc

SEQ ID NO: 187 - RNA, 6204 nt, synthetic construct
  misc_feature 1..6204: note = Description of Artificial Sequence: Synthetic polynucleotide
  source 1..6204: mol_type = other RNA
gacaagaagtacagcatcggcctggacatcggcaccaactctgtgggctgggccgtgatcaccgacgagtacaaggtgcccagcaagaaattcaaggtgctgggcaacaccgaccggcacagcatcaagaagaacctgatcggagccctgctgttcgacagcggcgaaacagccgaggccacccggctgaagagaaccgccagaagaagatacaccagacggaagaaccggatctgctatctgcaagagatcttcagcaacgagatggccaaggtggacgacagcttcttccacagactggaagagtccttcctggtggaagaggataagaagcacgagcggcaccccatcttcggcaacatcgtggacgaggtggcctaccacgagaagtaccccaccatctaccacctgagaaagaaactggtggacagcaccgacaaggccgacctgcggctgatctatctggccctggcccacatgatcaagttccggggccacttcctgatcgagggcgacctgaaccccgacaacagcgacgtggacaagctgttcatccagctggtgcagacctacaaccagctgttcgaggaaaaccccatcaacgccagcggcgtggacgccaaggccatcctgtctgccagactgagcaagagcagacggctggaaaatctgatcgcccagctgcccggcgagaagaagaatggcctgttcggaaacctgattgccctgagcctgggcctgacccccaacttcaagagcaacttcgacctggccgaggatgccaaactgcagctgagcaaggacacctacgacgacgacctggacaacctgctggcccagatcggcgaccagtacgccgacctgtttctggccgccaagaacctgtccgacgccatcctgctgagcgacatcctgagagtgaacaccgagatcaccaaggcccccctgagcgcctctatgatcaagagatacgacgagcaccaccaggacctgaccctgctgaaagctctcgtgcggcagcagctgcctgagaagtacaaagagattttcttcgaccagagcaagaacggctacgccggctacattgacggcggagccagccaggaagagttctacaagttcatcaagcccatcctggaaaagatggacggcaccgaggaactgctcgtgaagctgaacagagaggacctgctgcggaagcagcggaccttcgacaacggcagcatcccccaccagatccacctgggagagctgcacgccattctgcggcggcaggaagatttttacccattcctgaaggacaaccgggaaaagatcgagaagatcctgaccttccgcatcccctactacgtgggccctctggccaggggaaacagcagattcgcctggatgaccagaaagagcgaggaaaccatcaccccctggaacttcgaggaagtggtggacaagggcgcttccgcccagagcttcatcgagcggatgaccaacttcgataagaacctgcccaacgagaaggtgctgcccaagcacagcctgctgtacgagtacttcaccgtgtataacgagctgaccaaagtgaaatacgtgaccgagggaatgagaaagcccgccttcctgagcggcgagcagaaaaaggccatcgtggacctgctgttcaagaccaaccggaaagtgaccgtgaagcagctgaaagaggactacttcaagaaaatcgagtgcttcgactccgtggaaatctccggcgtggaagatcggttcaacgcctccctgggcacataccacgatctgctgaaaattatcaaggacaaggacttcctggacaatgaggaaaacgaggacattctggaagatatcgtgctgaccctgacactgtttgaggacagagagatgatcgaggaacggctgaaaacctatgcccacctgttcgacgacaaagtgatgaagcagctgaagcggcggagatacaccggctggggcaggctgagccggaagctgatcaacggcatccgggacaagcagtccggcaagacaatcctggatttcctgaagtccgacggcttcgccaacagaaacttcatgcagctgatccacgacgacagcctgacctttaaagaggacatccagaaagcccaggtgtccggccagggcgatagcctgcacgagcacattgccaatctggccggcagccccgccattaagaagggcatcctgcagacagtgaaggtggtggacgagctcgtgaaagtgatgggccggcacaagcccgagaacatcgtgatcgaaatggccagagagaaccagaccacccagaagggacagaagaacagccgcgagagaatgaagcggatcgaagagggcatcaaagagctgggcagccagatcctgaaagaacaccccgtggaaaacacccagctgcagaacgagaagctgtacctgtactacctgcagaatgggcgggatatgtacgtggaccaggaactggacatcaaccggctgtccgactacgatgtggacgctatcgtgcctcagagctttctgaaggacgactccatcgacaacaaggtgctgaccagaagcgacaagaaccggggcaagagcgacaacgtgccctccgaagaggtcgtgaagaagatgaagaactactggcggcagctgctgaacgccaagctgattacccagagaaagttcgacaatctgaccaaggccgagagaggcggcctgagcgaactggataaggccggcttcatcaagagacagctggtggaaacccggcagatcacaaagcacgtggcacagatcctggactcccggatgaacactaagtacgacgagaatgacaagctgatccgggaagtgaaagtgatcaccctgaagtccaagctggtgtccgatttccggaaggatttccagttttacaaagtgcgcgagatcaacaactaccaccacgcccacgacgcctacctgaacgccgtcgtgggaaccgccctgatcaaaaagtaccctaagctggaaagcgagttcgtgtacggcgactacaaggtgtacgacgtgcggaagatgatcgccaagagcgagcaggaaatcggcaaggctaccgccaagtacttcttctacagcaacatcatgaactttttcaagaccgagattaccctggccaacggcgagatccggaagcggcctctgatcgagacaaacggcgaaaccggggagatcgtgtgggataagggccgggattttgccaccgtgcggaaagtgctgagcatgccccaagtgaatatcgtgaaaaagaccgaggtgcagacaggcggcttcagcaaagagtctatcctgcccaagaggaacagcgataagctgatcgccagaaagaaggactgggaccctaagaagtacggcggcttcgacagccccaccgtggcctattctgtgctggtggtggccaaagtggaaaagggcaagtccaagaaactgaagagtgtgaaagagctgctggggatcaccatcatggaaagaagcagcttcgagaagaatcccatcgactttctggaagccaagggctacaaagaagtgaaaaaggacctgatcatcaagctgcctaagtactccctgttcgagctggaaaacggccggaagagaatgctggcctctgccggcgaactgcagaagggaaacgaactggccctgccctccaaatatgtgaacttcctgtacctggccagccactatgagaagctgaagggctcccccgaggataatgagcagaaacagctgtttgtggaacagcacaagcactacctggacgagatcatcgagcagatcagcgagttctccaagagagtgatcctggccgacgctaatctggacaaagtgctgtccgcctacaacaagcaccgggataagcccatcagagagcaggccgagaatatcatccacctgtttaccctgaccaatctgggagcccctgccgccttcaagtactttgacaccaccatcgaccggaagaggtacaccagcaccaaagaggtgctggacgccaccctgatccaccagagcatcaccggcctgtacgagacacggatcgacctgtctcagctgggaggtgactccggcggatctagcggcagcgagacacccggcaccagcgaaagcgccacccctgagagcagcggcggctctaccctgaacatcgaggacgagtacaggctgcacgagaccagcaaggagcccgacgtgagcctgggcagcacctggctgagcgatttccctcaggcttgggccgagaccggcggcatgggcctggccgtgcggcaggcccccctgattatccccctgaaggccaccagcacccccgtgagcatcaagcagtacccaatgtcccaggaggccaggctgggcatcaagcctcacatccagaggctgctggaccagggcatcctggtgccatgccagtccccctggaacacccctctgctgcccgtgaagaagcctggcaccaacgactaccggcccgtgcaggacctgagagaagtgaacaagcgggtggaggacatccacccaaccgtgcccaacccttacaacctgctgtccggcctgccccccagccaccagtggtacaccgtgctggacctgaaggacgccttcttctgcctgagactgcaccccacctctcagcccctgttcgccttcgagtggcgcgaccccgagatgggcatcagcggccagctgacctggaccagactgccacagggctttaagaatagcccaaccctgtttaacgaggccctgcacagggacctggccgacttcaggatccagcaccccgacctgattctgctgcagtacgtggacgacctgctgctggccgctaccagcgagctggactgccagcagggcaccagagccctgctgcagaccctgggcaacctgggctacagagccagcgccaagaaggcccagatctgtcagaagcaggtgaagtatctgggctacctgctgaaggaaggccagagatggctgaccgaggccagaaaggagactgtgatgggccagcccacccccaagacccccaggcagctgcgggagttcctgggcaaggccggcttttgcagactgtttatccctggcttcgccgagatggccgccccactgtaccctctgaccaagcctggcaccctgtttaactggggccccgaccagcagaaggcctaccaggagatcaagcaggccctgctgaccgcccccgccctgggcctgcccgacctgaccaagcctttcgagctgttcgtggacgagaagcagggatacgccaaaggcgtgctgacccagaagctgggcccctggcggaggcccgtggcctacctgagcaaaaaactggaccctgtggccgccggctggcccccatgcctgcggatggtggccgccatcgctgtgctgaccaaggacgccggcaagctgaccatgggccagcccctggtgatcctggcccctcacgccgtggaggctctggtgaagcagcctccagacaggtggctgtccaacgccaggatgacccactaccaggccctgctgctggacaccgaccgggtgcagttcggccctgtggtggccctgaaccccgccaccctgctgcctctgccagaggagggcctgcagcacaactgcctggacatcctggccgaggcccacggcaccaggcccgacctgaccgaccagcccctgcctgacgccgaccacacctggtacaccgacggcagctccctgctgcaggagggccagaggaaggccggcgccgccgtgaccaccgagaccgaggtgatctgggccaaagccctgcctgccggcacctccgcccagcgggccgagctgatcgccctgacccaggccctgaagatggctgagggcaagaagctgaacgtgtacaccgattccagatacgccttcgccaccgcccacatccacggcgagatctacagaagaaggggctggctgacctccgagggcaaggagatcaagaacaaggacgagattctggccctgctgaaggccctgttcctgcctaagagactgagcatcatccactgtcccggccaccagaagggccacagcgccgaggccagaggcaatagaatggccgaccaggccgccagaaaggccgccatcaccgagacccccgacaccagcaccctgctgatcgagaacagcagcccc

SEQ ID NO: 188 - protein, 1895 aa, synthetic construct
  REGION 1..1895: note = Description of Artificial Sequence: Synthetic polypeptide
DKKYSIGLDIGTNSVGWAVITDEYKVPSKKFKVLGNTDRHSIKKNLIGALLFDSGETAEATRLKRTARRRYTRRKNRICYLQEIFSNEMAKVDDSFFHRLEESFLVEEDKKHERHPIFGNIVDEVAYHEKYPTIYHLRKKLVDSTDKADLRLIYLALAHMIKFRGHFLIEGDLNPDNSDVDKLFIQLVQTYNQLFEENPINASGVDAKAILSARLSKSRRLENLIAQLPGEKKNGLFGNLIALSLGLTPNFKSNFDLAEDAKLQLSKDTYDDDLDNLLAQIGDQYADLFLAAKNLSDAILLSDILRVNTEITKAPLSASMIKRYDEHHQDLTLLKALVRQQLPEKYKEIFFDQSKNGYAGYIDGGASQEEFYKFIKPILEKMDGTEELLVKLNREDLLRKQRTFDNGSIPHQIHLGELHAILRRQEDFYPFLKDNREKIEKILTFRIPYYVGPLARGNSRFAWMTRKSEETITPWNFEEVVDKGASAQSFIERMTNFDKNLPNEKVLPKHSLLYEYFTVYNELTKVKYVTEGMRKPAFLSGEQKKAIVDLLFKTNRKVTVKQLKEDYFKKIECFDSVEISGVEDRFNASLGTYHDLLKIIKDKDFLDNEENEDILEDIVLTLTLFEDREMIEERLKTYAHLFDDKVMKQLKRRRYTGWGRLSRKLINGIRDKQSGKTILDFLKSDGFANRNFMQLIHDDSLTFKEDIQKAQVSGQGDSLHEHIANLAGSPAIKKGILQTVKVVDELVKVMGRHKPENIVIEMARENQTTQKGQKNSRERMKRIEEGIKELGSQILKEHPVENTQLQNEKLYLYYLQNGRDMYVDQELDINRLSDYDVDAIVPQSFLKDDSIDNKVLTRSDKNRGKSDNVPSEEVVKKMKNYWRQLLNAKLITQRKFDNLTKAERGGLSELDKAGFIKRQLVETRQITKHVAQILDSRMNTKYDENDKLIREVKVITLKSKLVSDFRKDFQFYKVREINNYHHAHDAYLNAVVGTALIKKYPKLESEFVYGDYKVYDVRKMIAKSEQEIGKATAKYFFYSNIMNFFKTEITLANGEIRKRPLIETNGETGEIVWDKGRDFATVRKVLSMPQVNIVKKTEVQTGGFSKESILPKRNSDKLIARKKDWDPKKYGGFDSPTVAYSVLVVAKVEKGKSKKLKSVKELLGITIMERSSFEKNPIDFLEAKGYKEVKKDLIIKLPKYSLFELENGRKRMLASAGELQKGNELALPSKYVNFLYLASHYEKLKGSPEDNEQKQLFVEQHKHYLDEIIEQISEFSKRVILADANLDKVLSAYNKHRDKPIREQAENIIHLFTLTNLGAPAAFKYFDTTIDRKRYTSTKEVLDATLIHQSITGLYETRIDLSQLGGDSGGSSGSETPGTSESATPESSGGSTLNIEDEYRLHETSKEPDVSLGSTWLSDFPQAWAETGGMGLAVRQAPLIIPLKATSTPVSIKQYPMSQEARLGIKPHIQRLLDQGILVPCQSPWNTPLLPVKKPGTNDYRPVQDLREVNKRVEDIHPTVPNPYNLLSGLPPSHQWYTVLDLKDAFFCLRLHPTSQPLFAFEWRDPEMGISGQLTWTRLPQGFKNSPTLFNEALHRDLADFRIQHPDLILLQYVDDLLLAATSELDCQQGTRALLQTLGNLGYRASAKKAQICQKQVKYLGYLLKEGQRWLTEARKETVMGQPTPKTPRQLREFLGKAGFCRLFIPGFAEMAAPLYPLTKPGTLFNWGPDQQKAYQEIKQALLTAPALGLPDLTKPFELFVDEKQGYAKGVLTQKLGPWRRPVAYLSKKLDPVAAGWPPCLRMVAAIAVLTKDAGKLTMGQPLVILAPHAVEALVKQPPDRWLSNARMTHYQALLLDTDRVQFGPVVALNPATLLPLPEEGLQHNCLDILAEAHG

SEQ ID NO: 189 - DNA, 5685 bp, synthetic construct
  misc_feature 1..5685: note = Description of Artificial Sequence: Synthetic polynucleotide
  source 1..5685: mol_type = other DNA
gacaagaagtacagcatcggcctggacatcggcaccaactctgtgggctgggccgtgatcaccgacgagtacaaggtgcccagcaagaaattcaaggtgctgggcaacaccgaccggcacagcatcaagaagaacctgatcggagccctgctgttcgacagcggcgaaacagccgaggccacccggctgaagagaaccgccagaagaagatacaccagacggaagaaccggatctgctatctgcaagagatcttcagcaacgagatggccaaggtggacgacagcttcttccacagactggaagagtccttcctggtggaagaggataagaagcacgagcggcaccccatcttcggcaacatcgtggacgaggtggcctaccacgagaagtaccccaccatctaccacctgagaaagaaactggtggacagcaccgacaaggccgacctgcggctgatctatctggccctggcccacatgatcaagttccggggccacttcctgatcgagggcgacctgaaccccgacaacagcgacgtggacaagctgttcatccagctggtgcagacctacaaccagctgttcgaggaaaaccccatcaacgccagcggcgtggacgccaaggccatcctgtctgccagactgagcaagagcagacggctggaaaatctgatcgcccagctgcccggcgagaagaagaatggcctgttcggaaacctgattgccctgagcctgggcctgacccccaacttcaagagcaacttcgacctggccgaggatgccaaactgcagctgagcaaggacacctacgacgacgacctggacaacctgctggcccagatcggcgaccagtacgccgacctgtttctggccgccaagaacctgtccgacgccatcctgctgagcgacatcctgagagtgaacaccgagatcaccaaggcccccctgagcgcctctatgatcaagagatacgacgagcaccaccaggacctgaccctgctgaaagctctcgtgcggcagcagctgcctgagaagtacaaagagattttcttcgaccagagcaagaacggctacgccggctacattgacggcggagccagccaggaagagttctacaagttcatcaagcccatcctggaaaagatggacggcaccgaggaactgctcgtgaagctgaacagagaggacctgctgcggaagcagcggaccttcgacaacggcagcatcccccaccagatccacctgggagagctgcacgccattctgcggcggcaggaagatttttacccattcctgaaggacaaccgggaaaagatcgagaagatcctgaccttccgcatcccctactacgtgggccctctggccaggggaaacagcagattcgcctggatgaccagaaagagcgaggaaaccatcaccccctggaacttcgaggaagtggtggacaagggcgcttccgcccagagcttcatcgagcggatgaccaacttcgataagaacctgcccaacgagaaggtgctgcccaagcacagcctgctgtacgagtacttcaccgtgtataacgagctgaccaaagtgaaatacgtgaccgagggaatgagaaagcccgccttcctgagcggcgagcagaaaaaggccatcgtggacctgctgttcaagaccaaccggaaagtgaccgtgaagcagctgaaagaggactacttcaagaaaatcgagtgcttcgactccgtggaaatctccggcgtggaagatcggttcaacgcctccctgggcacataccacgatctgctgaaaattatcaaggacaaggacttcctggacaatgaggaaaacgaggacattctggaagatatcgtgctgaccctgacactgtttgaggacagagagatgatcgaggaacggctgaaaacctatgcccacctgttcgacgacaaagtgatgaagcagctgaagcggcggagatacaccggctggggcaggctgagccggaagctgatcaacggcatccgggacaagcagtccggcaagacaatcctggatttcctgaagtccgacggcttcgccaacagaaacttcatgcagctgatccacgacgacagcctgacctttaaagaggacatccagaaagcccaggtgtccggccagggcgatagcctgcacgagcacattgccaatctggccggcagccccgccattaagaagggcatcctgcagacagtgaaggtggtggacgagctcgtgaaagtgatgggccggcacaagcccgagaacatcgtgatcgaaatggccagagagaaccagaccacccagaagggacagaagaacagccgcgagagaatgaagcggatcgaagagggcatcaaagagctgggcagccagatcctgaaagaacaccccgtggaaaacacccagctgcagaacgagaagctgtacctgtactacctgcagaatgggcgggatatgtacgtggaccaggaactggacatcaaccggctgtccgactacgatgtggacgctatcgtgcctcagagctttctgaaggacgactccatcgacaacaaggtgctgaccagaagcgacaagaaccggggcaagagcgacaacgtgccctccgaagaggtcgtgaagaagatgaagaactactggcggcagctgctgaacgccaagctgattacccagagaaagttcgacaatctgaccaaggccgagagaggcggcctgagcgaactggataaggccggcttcatcaagagacagctggtggaaacccggcagatcacaaagcacgtggcacagatcctggactcccggatgaacactaagtacgacgagaatgacaagctgatccgggaagtgaaagtgatcaccctgaagtccaagctggtgtccgatttccggaaggatttccagttttacaaagtgcgcgagatcaacaactaccaccacgcccacgacgcctacctgaacgccgtcgtgggaaccgccctgatcaaaaagtaccctaagctggaaagcgagttcgtgtacggcgactacaaggtgtacgacgtgcggaagatgatcgccaagagcgagcaggaaatcggcaaggctaccgccaagtacttcttctacagcaacatcatgaactttttcaagaccgagattaccctggccaacggcgagatccggaagcggcctctgatcgagacaaacggcgaaaccggggagatcgtgtgggataagggccgggattttgccaccgtgcggaaagtgctgagcatgccccaagtgaatatcgtgaaaaagaccgaggtgcagacaggcggcttcagcaaagagtctatcctgcccaagaggaacagcgataagctgatcgccagaaagaaggactgggaccctaagaagtacggcggcttcgacagccccaccgtggcctattctgtgctggtggtggccaaagtggaaaagggcaagtccaagaaactgaagagtgtgaaagagctgctggggatcaccatcatggaaagaagcagcttcgagaagaatcccatcgactttctggaagccaagggctacaaagaagtgaaaaaggacctgatcatcaagctgcctaagtactccctgttcgagctggaaaacggccggaagagaatgctggcctctgccggcgaactgcagaagggaaacgaactggccctgccctccaaatatgtgaacttcctgtacctggccagccactatgagaagctgaagggctcccccgaggataatgagcagaaacagctgtttgtggaacagcacaagcactacctggacgagatcatcgagcagatcagcgagttctccaagagagtgatcctggccgacgctaatctggacaaagtgctgtccgcctacaacaagcaccgggataagcccatcagagagcaggccgagaatatcatccacctgtttaccctgaccaatctgggagcccctgccgccttcaagtactttgacaccaccatcgaccggaagaggtacaccagcaccaaagaggtgctggacgccaccctgatccaccagagcatcaccggcctgtacgagacacggatcgacctgtctcagctgggaggtgactccggcggatctagcggcagcgagacacccggcaccagcgaaagcgccacccctgagagcagcggcggctctaccctgaacatcgaggacgagtacaggctgcacgagaccagcaaggagcccgacgtgagcctgggcagcacctggctgagcgatttccctcaggcttgggccgagaccggcggcatgggcctggccgtgcggcaggcccccctgattatccccctgaaggccaccagcacccccgtgagcatcaagcagtacccaatgtcccaggaggccaggctgggcatcaagcctcacatccagaggctgctggaccagggcatcctggtgccatgccagtccccctggaacacccctctgctgcccgtgaagaagcctggcaccaacgactaccggcccgtgcaggacctgagagaagtgaacaagcgggtggaggacatccacccaaccgtgcccaacccttacaacctgctgtccggcctgccccccagccaccagtggtacaccgtgctggacctgaaggacgccttcttctgcctgagactgcaccccacctctcagcccctgttcgccttcgagtggcgcgaccccgagatgggcatcagcggccagctgacctggaccagactgccacagggctttaagaatagcccaaccctgtttaacgaggccctgcacagggacctggccgacttcaggatccagcaccccgacctgattctgctgcagtacgtggacgacctgctgctggccgctaccagcgagctggactgccagcagggcaccagagccctgctgcagaccctgggcaacctgggctacagagccagcgccaagaaggcccagatctgtcagaagcaggtgaagtatctgggctacctgctgaaggaaggccagagatggctgaccgaggccagaaaggagactgtgatgggccagcccacccccaagacccccaggcagctgcgggagttcctgggcaaggccggcttttgcagactgtttatccctggcttcgccgagatggccgccccactgtaccctctgaccaagcctggcaccctgtttaactggggccccgaccagcagaaggcctaccaggagatcaagcaggccctgctgaccgcccccgccctgggcctgcccgacctgaccaagcctttcgagctgttcgtggacgagaagcagggatacgccaaaggcgtgctgacccagaagctgggcccctggcggaggcccgtggcctacctgagcaaaaaactggaccctgtggccgccggctggcccccatgcctgcggatggtggccgccatcgctgtgctgaccaaggacgccggcaagctgaccatgggccagcccctggtgatcctggcccctcacgccgtggaggctctggtgaagcagcctccagacaggtggctgtccaacgccaggatgacccactaccaggccctgctgctggacaccgaccgggtgcagttcggccctgtggtggccctgaaccccgccaccctgctgcctctgccagaggagggcctgcagcacaactgcctggacatcctggccgaggcccacggc

SEQ ID NO: 190 - RNA, 5685 nt, synthetic construct
  misc_feature 1..5685: note = Description of Artificial Sequence: Synthetic polynucleotide
  source 1..5685: mol_type = other RNA
gacaagaagtacagcatcggcctggacatcggcaccaactctgtgggctgggccgtgatcaccgacgagtacaaggtgcccagcaagaaattcaaggtgctgggcaacaccgaccggcacagcatcaagaagaacctgatcggagccctgctgttcgacagcggcgaaacagccgaggccacccggctgaagagaaccgccagaagaagatacaccagacggaagaaccggatctgctatctgcaagagatcttcagcaacgagatggccaaggtggacgacagcttcttccacagactggaagagtccttcctggtggaagaggataagaagcacgagcggcaccccatcttcggcaacatcgtggacgaggtggcctaccacgagaagtaccccaccatctaccacctgagaaagaaactggtggacagcaccgacaaggccgacctgcggctgatctatctggccctggcccacatgatcaagttccggggccacttcctgatcgagggcgacctgaaccccgacaacagcgacgtggacaagctgttcatccagctggtgcagacctacaaccagctgttcgaggaaaaccccatcaacgccagcggcgtggacgccaaggccatcctgtctgccagactgagcaagagcagacggctggaaaatctgatcgcccagctgcccggcgagaagaagaatggcctgttcggaaacctgattgccctgagcctgggcctgacccccaacttcaagagcaacttcgacctggccgaggatgccaaactgcagctgagcaaggacacctacgacgacgacctggacaacctgctggcccagatcggcgaccagtacgccgacctgtttctggccgccaagaacctgtccgacgccatcctgctgagcgacatcctgagagtgaacaccgagatcaccaaggcccccctgagcgcctctatgatcaagagatacgacgagcaccaccaggacctgaccctgctgaaagctctcgtgcggcagcagctgcctgagaagtacaaagagattttcttcgaccagagcaagaacggctacgccggctacattgacggcggagccagccaggaagagttctacaagttcatcaagcccatcctggaaaagatggacggcaccgaggaactgctcgtgaagctgaacagagaggacctgctgcggaagcagcggaccttcgacaacggcagcatcccccaccagatccacctgggagagctgcacgccattctgcggcggcaggaagatttttacccattcctgaaggacaaccgggaaaagatcgagaagatcctgaccttccgcatcccctactacgtgggccctctggccaggggaaacagcagattcgcctggatgaccagaaagagcgaggaaaccatcaccccctggaacttcgaggaagtggtggacaagggcgcttccgcccagagcttcatcgagcggatgaccaacttcgataagaacctgcccaacgagaaggtgctgcccaagcacagcctgctgtacgagtacttcaccgtgtataacgagctgaccaaagtgaaatacgtgaccgagggaatgagaaagcccgccttcctgagcggcgagcagaaaaaggccatcgtggacctgctgttcaagaccaaccggaaagtgaccgtgaagcagctgaaagaggactacttcaagaaaatcgagtgcttcgactccgtggaaatctccggcgtggaagatcggttcaacgcctccctgggcacataccacgatctgctgaaaattatcaaggacaaggacttcctggacaatgaggaaaacgaggacattctggaagatatcgtgctgaccctgacactgtttgaggacagagagatgatcgaggaacggctgaaaacctatgcccacctgttcgacgacaaagtgatgaagcagctgaagcggcggagatacaccggctggggcaggctgagccggaagctgatcaacggcatccgggacaagcagtccggcaagacaatcctggatttcctgaagtccgacggcttcgccaacagaaacttcatgcagctgatccacgacgacagcctgacctttaaagaggacatccagaaagcccaggtgtccggccagggcgatagcctgcacgagcacattgccaatctggccggcagccccgccattaagaagggcatcctgcagacagtgaaggtggtggacgagctcgtgaaagtgatgggccggcacaagcccgagaacatcgtgatcgaaatggccagagagaaccagaccacccagaagggacagaagaacagccgcgagagaatgaagcggatcgaagagggcatcaaagagctgggcagccagatcctgaaagaacaccccgtggaaaacacccagctgcagaacgagaagctgtacctgtactacctgcagaatgggcgggatatgtacgtggaccaggaactggacatcaaccggctgtccgactacgatgtggacgctatcgtgcctcagagctttctgaaggacgactccatcgacaacaaggtgctgaccagaagcgacaagaaccggggcaagagcgacaacgtgccctccgaagaggtcgtgaagaagatgaagaactactggcggcagctgctgaacgccaagctgattacccagagaaagttcgacaatctgaccaaggccgagagaggcggcctgagcgaactggataaggccggcttcatcaagagacagctggtggaaacccggcagatcacaaagcacgtggcacagatcctggactcccggatgaacactaagtacgacgagaatgacaagctgatccgggaagtgaaagtgatcaccctgaagtccaagctggtgtccgatttccggaaggatttccagttttacaaagtgcgcgagatcaacaactaccaccacgcccacgacgcctacctgaacgccgtcgtgggaaccgccctgatcaaaaagtaccctaagctggaaagcgagttcgtgtacggcgactacaaggtgtacgacgtgcggaagatgatcgccaagagcgagcaggaaatcggcaaggctaccgccaagtacttcttctacagcaacatcatgaactttttcaagaccgagattaccctggccaacggcgagatccggaagcggcctctgatcgagacaaacggcgaaaccggggagatcgtgtgggataagggccgggattttgccaccgtgcggaaagtgctgagcatgccccaagtgaatatcgtgaaaaagaccgaggtgcagacaggcggcttcagcaaagagtctatcctgcccaagaggaacagcgataagctgatcgccagaaagaaggactgggaccctaagaagtacggcggcttcgacagccccaccgtggcctattctgtgctggtggtggccaaagtggaaaagggcaagtccaagaaactgaagagtgtgaaagagctgctggggatcaccatcatggaaagaagcagcttcgagaagaatcccatcgactttctggaagccaagggctacaaagaagtgaaaaaggacctgatcatcaagctgcctaagtactccctgttcgagctggaaaacggccggaagagaatgctggcctctgccggcgaactgcagaagggaaacgaactggccctgccctccaaatatgtgaacttcctgtacctggccagccactatgagaagctgaagggctcccccgaggataatgagcagaaacagctgtttgtggaacagcacaagcactacctggacgagatcatcgagcagatcagcgagttctccaagagagtgatcctggccgacgctaatctggacaaagtgctgtccgcctacaacaagcaccgggataagcccatcagagagcaggccgagaatatcatccacctgtttaccctgaccaatctgggagcccctgccgccttcaagtactttgacaccaccatcgaccggaagaggtacaccagcaccaaagaggtgctggacgccaccctgatccaccagagcatcaccggcctgtacgagacacggatcgacctgtctcagctgggaggtgactccggcggatctagcggcagcgagacacccggcaccagcgaaagcgccacccctgagagcagcggcggctctaccctgaacatcgaggacgagtacaggctgcacgagaccagcaaggagcccgacgtgagcctgggcagcacctggctgagcgatttccctcaggcttgggccgagaccggcggcatgggcctggccgtgcggcaggcccccctgattatccccctgaaggccaccagcacccccgtgagcatcaagcagtacccaatgtcccaggaggccaggctgggcatcaagcctcacatccagaggctgctggaccagggcatcctggtgccatgccagtccccctggaacacccctctgctgcccgtgaagaagcctggcaccaacgactaccggcccgtgcaggacctgagagaagtgaacaagcgggtggaggacatccacccaaccgtgcccaacccttacaacctgctgtccggcctgccccccagccaccagtggtacaccgtgctggacctgaaggacgccttcttctgcctgagactgcaccccacctctcagcccctgttcgccttcgagtggcgcgaccccgagatgggcatcagcggccagctgacctggaccagactgccacagggctttaagaatagcccaaccctgtttaacgaggccctgcacagggacctggccgacttcaggatccagcaccccgacctgattctgctgcagtacgtggacgacctgctgctggccgctaccagcgagctggactgccagcagggcaccagagccctgctgcagaccctgggcaacctgggctacagagccagcgccaagaaggcccagatctgtcagaagcaggtgaagtatctgggctacctgctgaaggaaggccagagatggctgaccgaggccagaaaggagactgtgatgggccagcccacccccaagacccccaggcagctgcgggagttcctgggcaaggccggcttttgcagactgtttatccctggcttcgccgagatggccgccccactgtaccctctgaccaagcctggcaccctgtttaactggggccccgaccagcagaaggcctaccaggagatcaagcaggccctgctgaccgcccccgccctgggcctgcccgacctgaccaagcctttcgagctgttcgtggacgagaagcagggatacgccaaaggcgtgctgacccagaagctgggcccctggcggaggcccgtggcctacctgagcaaaaaactggaccctgtggccgccggctggcccccatgcctgcggatggtggccgccatcgctgtgctgaccaaggacgccggcaagctgaccatgggccagcccctggtgatcctggcccctcacgccgtggaggctctggtgaagcagcctccagacaggtggctgtccaacgccaggatgacccactaccaggccctgctgctggacaccgaccgggtgcagttcggccctgtggtggccctgaaccccgccaccctgctgcctctgccagaggagggcctgcagcacaactgcctggacatcctggccgaggcccacggc

SEQ ID NO: 191 - protein, 2076 aa, synthetic construct
  REGION 1..2076: note = Description of Artificial Sequence: Synthetic polypeptide
DKKYSIGLDIGTNSVGWAVITDEYKVPSKKFKVLGNTDRHSIKKNLIGALLFDSGETAEATRLKRTARRRYTRRKNRICYLQEIFSNEMAKVDDSFFHRLEESFLVEEDKKHERHPIFGNIVDEVAYHEKYPTIYHLRKKLVDSTDKADLRLIYLALAHMIKFRGHFLIEGDLNPDNSDVDKLFIQLVQTYNQLFEENPINASGVDAKAILSARLSKSRRLENLIAQLPGEKKNGLFGNLIALSLGLTPNFKSNFDLAEDAKLQLSKDTYDDDLDNLLAQIGDQYADLFLAAKNLSDAILLSDILRVNTEITKAPLSASMIKRYDEHHQDLTLLKALVRQQLPEKYKEIFFDQSKNGYAGYIDGGASQEEFYKFIKPILEKMDGTEELLVKLNREDLLRKQRTFDNGSIPHQIHLGELHAILRRQEDFYPFLKDNREKIEKILTFRIPYYVGPLARGNSRFAWMTRKSEETITPWNFEEVVDKGASAQSFIERMTNFDKNLPNEKVLPKHSLLYEYFTVYNELTKVKYVTEGMRKPAFLSGEQKKAIVDLLFKTNRKVTVKQLKEDYFKKIECFDSVEISGVEDRFNASLGTYHDLLKIIKDKDFLDNEENEDILEDIVLTLTLFEDREMIEERLKTYAHLFDDKVMKQLKRRRYTGWGRLSRKLINGIRDKQSGKTILDFLKSDGFANRNFMQLIHDDSLTFKEDIQKAQVSGQGDSLHEHIANLAGSPAIKKGILQTVKVVDELVKVMGRHKPENIVIEMARENQTTQKGQKNSRERMKRIEEGIKELGSQILKEHPVENTQLQNEKLYLYYLQNGRDMYVDQELDINRLSDYDVDAIVPQSFLKDDSIDNKVLTRSDKNRGKSDNVPSEEVVKKMKNYWRQLLNAKLITQRKFDNLTKAERGGLSELDKAGFIKRQLVETRQITKHVAQILDSRMNTKYDENDKLIREVKVITLKSKLVSDFRKDFQFYKVREINNYHHAHDAYLNAVVGTALIKKYPKLESEFVYGDYKVYDVRKMIAKSEQEIGKATAKYFFYSNIMNFFKTEITLANGEIRKRPLIETNGETGEIVWDKGRDFATVRKVLSMPQVNIVKKTEVQTGGFSKESILPKRNSDKLIARKKDWDPKKYGGFDSPTVAYSVLVVAKVEKGKSKKLKSVKELLGITIMERSSFEKNPIDFLEAKGYKEVKKDLIIKLPKYSLFELENGRKRMLASAGELQKGNELALPSKYVNFLYLASHYEKLKGSPEDNEQKQLFVEQHKHYLDEIIEQISEFSKRVILADANLDKVLSAYNKHRDKPIREQAENIIHLFTLTNLGAPAAFKYFDTTIDRKRYTSTKEVLDATLIHQSITGLYETRIDLSQLGGDSGGSSGGSSGSETPGTSESATPESSGGSSGGSTLNIEDEYRLHETSKEPDVSLGSTWLSDFPQAWAETGGMGLAVRQAPLIIPLKATSTPVSIKQYPMSQEARLGIKPHIQRLLDQGILVPCQSPWNTPLLPVKKPGTNDYRPVQDLREVNKRVEDIHPTVPNPYNLLSGLPPSHQWYTVLDLKDAFFCLRLHPTSQPLFAFEWRDPEMGISGQLTWTRLPQGFKNSPTLFNEALHRDLADFRIQHPDLILLQYVDDLLLAATSELDCQQGTRALLQTLGNLGYRASAKKAQICQKQVKYLGYLLKEGQRWLTEARKETVMGQPTPKTPRQLREFLGKAGFCRLFIPGFAEMAAPLYPLTKPGTLFNWGPDQQKAYQEIKQALLTAPALGLPDLTKPFELFVDEKQGYAKGVLTQKLGPWRRPVAYLSKKLDPVAAGWPPCLRMVAAIAVLTKDAGKLTMGQPLVILAPHAVEALVKQPPDRWLSNARMTHYQALLLDTDRVQFGPVVALNPATLLPLPEEGLQHNCLDILAEAHGTRPDLTDQPLPDADHTWYTDGSSLLQEGQRKAGAAVTTETEVIWAKALPAGTSAQRAELIALTQALKMAEGKKLNVYTDSRYAFATAHIHGEIYRRRGWLTSEGKEIKNKDEILALLKALFLPKRLSIIHCPGHQKGHSAEARGNRMADQAARKAAITETPDTSTLLIENSSP

SEQ ID NO: 192 - DNA, 6228 bp, synthetic construct
  misc_feature 1..6228: note = Description of Artificial Sequence: Synthetic polynucleotide
  source 1..6228: mol_type = other DNA
gacaagaagtacagcatcggcctggacatcggcaccaactctgtgggctgggccgtgatcaccgacgagtacaaggtgcccagcaagaaattcaaggtgctgggcaacaccgaccggcacagcatcaagaagaacctgatcggagccctgctgttcgacagcggcgaaacagccgaggccacccggctgaagagaaccgccagaagaagatacaccagacggaagaaccggatctgctatctgcaagagatcttcagcaacgagatggccaaggtggacgacagcttcttccacagactggaagagtccttcctggtggaagaggataagaagcacgagcggcaccccatcttcggcaacatcgtggacgaggtggcctaccacgagaagtaccccaccatctaccacctgagaaagaaactggtggacagcaccgacaaggccgacctgcggctgatctatctggccctggcccacatgatcaagttccggggccacttcctgatcgagggcgacctgaaccccgacaacagcgacgtggacaagctgttcatccagctggtgcagacctacaaccagctgttcgaggaaaaccccatcaacgccagcggcgtggacgccaaggccatcctgtctgccagactgagcaagagcagacggctggaaaatctgatcgcccagctgcccggcgagaagaagaatggcctgttcggaaacctgattgccctgagcctgggcctgacccccaacttcaagagcaacttcgacctggccgaggatgccaaactgcagctgagcaaggacacctacgacgacgacctggacaacctgctggcccagatcggcgaccagtacgccgacctgtttctggccgccaagaacctgtccgacgccatcctgctgagcgacatcctgagagtgaacaccgagatcaccaaggcccccctgagcgcctctatgatcaagagatacgacgagcaccaccaggacctgaccctgctgaaagctctcgtgcggcagcagctgcctgagaagtacaaagagattttcttcgaccagagcaagaacggctacgccggctacattgacggcggagccagccaggaagagttctacaagttcatcaagcccatcctggaaaagatggacggcaccgaggaactgctcgtgaagctgaacagagaggacctgctgcggaagcagcggaccttcgacaacggcagcatcccccaccagatccacctgggagagctgcacgccattctgcggcggcaggaagatttttacccattcctgaaggacaaccgggaaaagatcgagaagatcctgaccttccgcatcccctactacgtgggccctctggccaggggaaacagcagattcgcctggatgaccagaaagagcgaggaaaccatcaccccctggaacttcgaggaagtggtggacaagggcgcttccgcccagagcttcatcgagcggatgaccaacttcgataagaacctgcccaacgagaaggtgctgcccaagcacagcctgctgtacgagtacttcaccgtgtataacgagctgaccaaagtgaaatacgtgaccgagggaatgagaaagcccgccttcctgagcggcgagcagaaaaaggccatcgtggacctgctgttcaagaccaaccggaaagtgaccgtgaagcagctgaaagaggactacttcaagaaaatcgagtgcttcgactccgtggaaatctccggcgtggaagatcggttcaacgcctccctgggcacataccacgatctgctgaaaattatcaaggacaaggacttcctggacaatgaggaaaacgaggacattctggaagatatcgtgctgaccctgacactgtttgaggacagagagatgatcgaggaacggctgaaaacctatgcccacctgttcgacgacaaagtgatgaagcagctgaagcggcggagatacaccggctggggcaggctgagccggaagctgatcaacggcatccgggacaagcagtccggcaagacaatcctggatttcctgaagtccgacggcttcgccaacagaaacttcatgcagctgatccacgacgacagcctgacctttaaagaggacatccagaaagcccaggtgtccggccagggcgatagcctgcacgagcacattgccaatctggccggcagccccgccattaagaagggcatcctgcagacagtgaaggtggtggacgagctcgtgaaagtgatgggccggcacaagcccgagaacatcgtgatcgaaatggccagagagaaccagaccacccagaagggacagaagaacagccgcgagagaatgaagcggatcgaagagggcatcaaagagctgggcagccagatcctgaaagaacaccccgtggaaaacacccagctgcagaacgagaagctgtacctgtactacctgcagaatgggcgggatatgtacgtggaccaggaactggacatcaaccggctgtccgactacgatgtggacgctatcgtgcctcagagctttctgaaggacgactccatcgacaacaaggtgctgaccagaagcgacaagaaccggggcaagagcgacaacgtgccctccgaagaggtcgtgaagaagatgaagaactactggcggcagctgctgaacgccaagctgattacccagagaaagttcgacaatctgaccaaggccgagagaggcggcctgagcgaactggataaggccggcttcatcaagagacagctggtggaaacccggcagatcacaaagcacgtggcacagatcctggactcccggatgaacactaagtacgacgagaatgacaagctgatccgggaagtgaaagtgatcaccctgaagtccaagctggtgtccgatttccggaaggatttccagttttacaaagtgcgcgagatcaacaactaccaccacgcccacgacgcctacctgaacgccgtcgtgggaaccgccctgatcaaaaagtaccctaagctggaaagcgagttcgtgtacggcgactacaaggtgtacgacgtgcggaagatgatcgccaagagcgagcaggaaatcggcaaggctaccgccaagtacttcttctacagcaacatcatgaactttttcaagaccgagattaccctggccaacggcgagatccggaagcggcctctgatcgagacaaacggcgaaaccggggagatcgtgtgggataagggccgggattttgccaccgtgcggaaagtgctgagcatgccccaagtgaatatcgtgaaaaagaccgaggtgcagacaggcggcttcagcaaagagtctatcctgcccaagaggaacagcgataagctgatcgccagaaagaaggactgggaccctaagaagtacggcggcttcgacagccccaccgtggcctattctgtgctggtggtggccaaagtggaaaagggcaagtccaagaaactgaagagtgtgaaagagctgctggggatcaccatcatggaaagaagcagcttcgagaagaatcccatcgactttctggaagccaagggctacaaagaagtgaaaaaggacctgatcatcaagctgcctaagtactccctgttcgagctggaaaacggccggaagagaatgctggcctctgccggcgaactgcagaagggaaacgaactggccctgccctccaaatatgtgaacttcctgtacctggccagccactatgagaagctgaagggctcccccgaggataatgagcagaaacagctgtttgtggaacagcacaagcactacctggacgagatcatcgagcagatcagcgagttctccaagagagtgatcctggccgacgctaatctggacaaagtgctgtccgcctacaacaagcaccgggataagcccatcagagagcaggccgagaatatcatccacctgtttaccctgaccaatctgggagcccctgccgccttcaagtactttgacaccaccatcgaccggaagaggtacaccagcaccaaagaggtgctggacgccaccctgatccaccagagcatcaccggcctgtacgagacacggatcgacctgtctcagctgggaggtgactccggcggaagcagcggcggctcttctggcagcgagacacccggcaccagcgaaagcgccacccctgagagcagcggcggatctagcggcggctccaccctgaacatcgaggacgagtacaggctgcacgagaccagcaaggagcccgacgtgagcctgggcagcacctggctgagcgatttccctcaggcttgggccgagaccggcggcatgggcctggccgtgcggcaggcccccctgattatccccctgaaggccaccagcacccccgtgagcatcaagcagtacccaatgtcccaggaggccaggctgggcatcaagcctcacatccagaggctgctggaccagggcatcctggtgccatgccagtccccctggaacacccctctgctgcccgtgaagaagcctggcaccaacgactaccggcccgtgcaggacctgagagaagtgaacaagcgggtggaggacatccacccaaccgtgcccaacccttacaacctgctgtccggcctgccccccagccaccagtggtacaccgtgctggacctgaaggacgccttcttctgcctgagactgcaccccacctctcagcccctgttcgccttcgagtggcgcgaccccgagatgggcatcagcggccagctgacctggaccagactgccacagggctttaagaatagcccaaccctgtttaacgaggccctgcacagggacctggccgacttcaggatccagcaccccgacctgattctgctgcagtacgtggacgacctgctgctggccgctaccagcgagctggactgccagcagggcaccagagccctgctgcagaccctgggcaacctgggctacagagccagcgccaagaaggcccagatctgtcagaagcaggtgaagtatctgggctacctgctgaaggaaggccagagatggctgaccgaggccagaaaggagactgtgatgggccagcccacccccaagacccccaggcagctgcgggagttcctgggcaaggccggcttttgcagactgtttatccctggcttcgccgagatggccgccccactgtaccctctgaccaagcctggcaccctgtttaactggggccccgaccagcagaaggcctaccaggagatcaagcaggccctgctgaccgcccccgccctgggcctgcccgacctgaccaagcctttcgagctgttcgtggacgagaagcagggatacgccaaaggcgtgctgacccagaagctgggcccctggcggaggcccgtggcctacctgagcaaaaaactggaccctgtggccgccggctggcccccatgcctgcggatggtggccgccatcgctgtgctgaccaaggacgccggcaagctgaccatgggccagcccctggtgatcctggcccctcacgccgtggaggctctggtgaagcagcctccagacaggtggctgtccaacgccaggatgacccactaccaggccctgctgctggacaccgaccgggtgcagttcggccctgtggtggccctgaaccccgccaccctgctgcctctgccagaggagggcctgcagcacaactgcctggacatcctggccgaggcccacggcaccaggcccgacctgaccgaccagcccctgcctgacgccgaccacacctggtacaccgacggcagctccctgctgcaggagggccagaggaaggccggcgccgccgtgaccaccgagaccgaggtgatctgggccaaagccctgcctgccggcacctccgcccagcgggccgagctgatcgccctgacccaggccctgaagatggctgagggcaagaagctgaacgtgtacaccgattccagatacgccttcgccaccgcccacatccacggcgagatctacagaagaaggggctggctgacctccgagggcaaggagatcaagaacaaggacgagattctggccctgctgaaggccctgttcctgcctaagagactgagcatcatccactgtcccggccaccagaagggccacagcgccgaggccagaggcaatagaatggccgaccaggccgccagaaaggccgccatcaccgagacccccgacaccagcaccctgctgatcgagaacagcagcccc

SEQ ID NO: 193 - RNA, 6228 nt, synthetic construct
  misc_feature 1..6228: note = Description of Artificial Sequence: Synthetic polynucleotide
  source 1..6228: mol_type = other RNA
gacaagaagtacagcatcggcctggacatcggcaccaactctgtgggctgggccgtgatcaccgacgagtacaaggtgcccagcaagaaattcaaggtgctgggcaacaccgaccggcacagcatcaagaagaacctgatcggagccctgctgttcgacagcggcgaaacagccgaggccacccggctgaagagaaccgccagaagaagatacaccagacggaagaaccggatctgctatctgcaagagatcttcagcaacgagatggccaaggtggacgacagcttcttccacagactggaagagtccttcctggtggaagaggataagaagcacgagcggcaccccatcttcggcaacatcgtggacgaggtggcctaccacgagaagtaccccaccatctaccacctgagaaagaaactggtggacagcaccgacaaggccgacctgcggctgatctatctggccctggcccacatgatcaagttccggggccacttcctgatcgagggcgacctgaaccccgacaacagcgacgtggacaagctgttcatccagctggtgcagacctacaaccagctgttcgaggaaaaccccatcaacgccagcggcgtggacgccaaggccatcctgtctgccagactgagcaagagcagacggctggaaaatctgatcgcccagctgcccggcgagaagaagaatggcctgttcggaaacctgattgccctgagcctgggcctgacccccaacttcaagagcaacttcgacctggccgaggatgccaaactgcagctgagcaaggacacctacgacgacgacctggacaacctgctggcccagatcggcgaccagtacgccgacctgtttctggccgccaagaacctgtccgacgccatcctgctgagcgacatcctgagagtgaacaccgagatcaccaaggcccccctgagcgcctctatgatcaagagatacgacgagcaccaccaggacctgaccctgctgaaagctctcgtgcggcagcagctgcctgagaagtacaaagagattttcttcgaccagagcaagaacggctacgccggctacattgacggcggagccagccaggaagagttctacaagttcatcaagcccatcctggaaaagatggacggcaccgaggaactgctcgtgaagctgaacagagaggacctgctgcggaagcagcggaccttcgacaacggcagcatcccccaccagatccacctgggagagctgcacgccattctgcggcggcaggaagatttttacccattcctgaaggacaaccgggaaaagatcgagaagatcctgaccttccgcatcccctactacgtgggccctctggccaggggaaacagcagattcgcctggatgaccagaaagagcgaggaaaccatcaccccctggaacttcgaggaagtggtggacaagggcgcttccgcccagagcttcatcgagcggatgaccaacttcgataagaacctgcccaacgagaaggtgctgcccaagcacagcctgctgtacgagtacttcaccgtgtataacgagctgaccaaagtgaaatacgtgaccgagggaatgagaaagcccgccttcctgagcggcgagcagaaaaaggccatcgtggacctgctgttcaagaccaaccggaaagtgaccgtgaagcagctgaaagaggactacttcaagaaaatcgagtgcttcgactccgtggaaatctccggcgtggaagatcggttcaacgcctccctgggcacataccacgatctgctgaaaattatcaaggacaaggacttcctggacaatgaggaaaacgaggacattctggaagatatcgtgctgaccctgacactgtttgaggacagagagatgatcgaggaacggctgaaaacctatgcccacctgttcgacgacaaagtgatgaagcagctgaagcggcggagatacaccggctggggcaggctgagccggaagctgatcaacggcatccgggacaagcagtccggcaagacaatcctggatttcctgaagtccgacggcttcgccaacagaaacttcatgcagctgatccacgacgacagcctgacctttaaagaggacatccagaaagcccaggtgtccggccagggcgatagcctgcacgagcacattgccaatctggccggcagccccgccattaagaagggcatcctgcagacagtgaaggtggtggacgagctcgtgaaagtgatgggccggcacaagcccgagaacatcgtgatcgaaatggccagagagaaccagaccacccagaagggacagaagaacagccgcgagagaatgaagcggatcgaagagggcatcaaagagctgggcagccagatcctgaaagaacaccccgtggaaaacacccagctgcagaacgagaagctgtacctgtactacctgcagaatgggcgggatatgtacgtggaccaggaactggacatcaaccggctgtccgactacgatgtggacgctatcgtgcctcagagctttctgaaggacgactccatcgacaacaaggtgctgaccagaagcgacaagaaccggggcaagagcgacaacgtgccctccgaagaggtcgtgaagaagatgaagaactactggcggcagctgctgaacgccaagctgattacccagagaaagttcgacaatctgaccaaggccgagagaggcggcctgagcgaactggataaggccggcttcatcaagagacagctggtggaaacccggcagatcacaaagcacgtggcacagatcctggactcccggatgaacactaagtacgacgagaatgacaagctgatccgggaagtgaaagtgatcaccctgaagtccaagctggtgtccgatttccggaaggatttccagttttacaaagtgcgcgagatcaacaactaccaccacgcccacgacgcctacctgaacgccgtcgtgggaaccgccctgatcaaaaagtaccctaagctggaaagcgagttcgtgtacggcgactacaaggtgtacgacgtgcggaagatgatcgccaagagcgagcaggaaatcggcaaggctaccgccaagtacttcttctacagcaacatcatgaactttttcaagaccgagattaccctggccaacggcgagatccggaagcggcctctgatcgagacaaacggcgaaaccggggagatcgtgtgggataagggccgggattttgccaccgtgcggaaagtgctgagcatgccccaagtgaatatcgtgaaaaagaccgaggtgcagacaggcggcttcagcaaagagtctatcctgcccaagaggaacagcgataagctgatcgccagaaagaaggactgggaccctaagaagtacggcggcttcgacagccccaccgtggcctattctgtgctggtggtggccaaagtggaaaagggcaagtccaagaaactgaagagtgtgaaagagctgctggggatcaccatcatggaaagaagcagcttcgagaagaatcccatcgactttctggaagccaagggctacaaagaagtgaaaaaggacctgatcatcaagctgcctaagtactccctgttcgagctggaaaacggccggaagagaatgctggcctctgccggcgaactgcagaagggaaacgaactggccctgccctccaaatatgtgaacttcctgtacctggccagccactatgagaagctgaagggctcccccgaggataatgagcagaaacagctgtttgtggaacagcacaagcactacctggacgagatcatcgagcagatcagcgagttctccaagagagtgatcctggccgacgctaatctggacaaagtgctgtccgcctacaacaagcaccgggataagcccatcagagagcaggccgagaatatcatccacctgtttaccctgaccaatctgggagcccctgccgccttcaagtactttgacaccaccatcgaccggaagaggtacaccagcaccaaagaggtgctggacgccaccctgatccaccagagcatcaccggcctgtacgagacacggatcgacctgtctcagctgggaggtgactccggcggaagcagcggcggctcttctggcagcgagacacccggcaccagcgaaagcgccacccctgagagcagcggcggatctagcggcggctccaccctgaacatcgaggacgagtacaggctgcacgagaccagcaaggagcccgacgtgagcctgggcagcacctggctgagcgatttccctcaggcttgggccgagaccggcggcatgggcctggccgtgcggcaggcccccctgattatccccctgaaggccaccagcacccccgtgagcatcaagcagtacccaatgtcccaggaggccaggctgggcatcaagcctcacatccagaggctgctggaccagggcatcctggtgccatgccagtccccctggaacacccctctgctgcccgtgaagaagcctggcaccaacgactaccggcccgtgcaggacctgagagaagtgaacaagcgggtggaggacatccacccaaccgtgcccaacccttacaacctgctgtccggcctgccccccagccaccagtggtacaccgtgctggacctgaaggacgccttcttctgcctgagactgcaccccacctctcagcccctgttcgccttcgagtggcgcgaccccgagatgggcatcagcggccagctgacctggaccagactgccacagggctttaagaatagcccaaccctgtttaacgaggccctgcacagggacctggccgacttcaggatccagcaccccgacctgattctgctgcagtacgtggacgacctgctgctggccgctaccagcgagctggactgccagcagggcaccagagccctgctgcagaccctgggcaacctgggctacagagccagcgccaagaaggcccagatctgtcagaagcaggtgaagtatctgggctacctgctgaaggaaggccagagatggctgaccgaggccagaaaggagactgtgatgggccagcccacccccaagacccccaggcagctgcgggagttcctgggcaaggccggcttttgcagactgtttatccctggcttcgccgagatggccgccccactgtaccctctgaccaagcctggcaccctgtttaactggggccccgaccagcagaaggcctaccaggagatcaagcaggccctgctgaccgcccccgccctgggcctgcccgacctgaccaagcctttcgagctgttcgtggacgagaagcagggatacgccaaaggcgtgctgacccagaagctgggcccctggcggaggcccgtggcctacctgagcaaaaaactggaccctgtggccgccggctggcccccatgcctgcggatggtggccgccatcgctgtgctgaccaaggacgccggcaagctgaccatgggccagcccctggtgatcctggcccctcacgccgtggaggctctggtgaagcagcctccagacaggtggctgtccaacgccaggatgacccactaccaggccctgctgctggacaccgaccgggtgcagttcggccctgtggtggccctgaaccccgccaccctgctgcctctgccagaggagggcctgcagcacaactgcctggacatcctggccgaggcccacggcaccaggcccgacctgaccgaccagcccctgcctgacgccgaccacacctggtacaccgacggcagctccctgctgcaggagggccagaggaaggccggcgccgccgtgaccaccgagaccgaggtgatctgggccaaagccctgcctgccggcacctccgcccagcgggccgagctgatcgccctgacccaggccctgaagatggctgagggcaagaagctgaacgtgtacaccgattccagatacgccttcgccaccgcccacatccacggcgagatctacagaagaaggggctggctgacctccgagggcaaggagatcaagaacaaggacgagattctggccctgctgaaggccctgttcctgcctaagagactgagcatcatccactgtcccggccaccagaagggccacagcgccgaggccagaggcaatagaatggccgaccaggccgccagaaaggccgccatcaccgagacccccgacaccagcaccctgctgatcgagaacagcagcccc

SEQ ID NO: 194 - protein, 1903 aa, synthetic construct
  REGION 1..1903: note = Description of Artificial Sequence: Synthetic polypeptide
DKKYSIGLDIGTNSVGWAVITDEYKVPSKKFKVLGNTDRHSIKKNLIGALLFDSGETAEATRLKRTARRRYTRRKNRICYLQEIFSNEMAKVDDSFFHRLEESFLVEEDKKHERHPIFGNIVDEVAYHEKYPTIYHLRKKLVDSTDKADLRLIYLALAHMIKFRGHFLIEGDLNPDNSDVDKLFIQLVQTYNQLFEENPINASGVDAKAILSARLSKSRRLENLIAQLPGEKKNGLFGNLIALSLGLTPNFKSNFDLAEDAKLQLSKDTYDDDLDNLLAQIGDQYADLFLAAKNLSDAILLSDILRVNTEITKAPLSASMIKRYDEHHQDLTLLKALVRQQLPEKYKEIFFDQSKNGYAGYIDGGASQEEFYKFIKPILEKMDGTEELLVKLNREDLLRKQRTFDNGSIPHQIHLGELHAILRRQEDFYPFLKDNREKIEKILTFRIPYYVGPLARGNSRFAWMTRKSEETITPWNFEEVVDKGASAQSFIERMTNFDKNLPNEKVLPKHSLLYEYFTVYNELTKVKYVTEGMRKPAFLSGEQKKAIVDLLFKTNRKVTVKQLKEDYFKKIECFDSVEISGVEDRFNASLGTYHDLLKIIKDKDFLDNEENEDILEDIVLTLTLFEDREMIEERLKTYAHLFDDKVMKQLKRRRYTGWGRLSRKLINGIRDKQSGKTILDFLKSDGFANRNFMQLIHDDSLTFKEDIQKAQVSGQGDSLHEHIANLAGSPAIKKGILQTVKVVDELVKVMGRHKPENIVIEMARENQTTQKGQKNSRERMKRIEEGIKELGSQILKEHPVENTQLQNEKLYLYYLQNGRDMYVDQELDINRLSDYDVDAIVPQSFLKDDSIDNKVLTRSDKNRGKSDNVPSEEVVKKMKNYWRQLLNAKLITQRKFDNLTKAERGGLSELDKAGFIKRQLVETRQITKHVAQILDSRMNTKYDENDKLIREVKVITLKSKLVSDFRKDFQFYKVREINNYHHAHDAYLNAVVGTALIKKYPKLESEFVYGDYKVYDVRKMIAKSEQEIGKATAKYFFYSNIMNFFKTEITLANGEIRKRPLIETNGETGEIVWDKGRDFATVRKVLSMPQVNIVKKTEVQTGGFSKESILPKRNSDKLIARKKDWDPKKYGGFDSPTVAYSVLVVAKVEKGKSKKLKSVKELLGITIMERSSFEKNPIDFLEAKGYKEVKKDLIIKLPKYSLFELENGRKRMLASAGELQKGNELALPSKYVNFLYLASHYEKLKGSPEDNEQKQLFVEQHKHYLDEIIEQISEFSKRVILADANLDKVLSAYNKHRDKPIREQAENIIHLFTLTNLGAPAAFKYFDTTIDRKRYTSTKEVLDATLIHQSITGLYETRIDLSQLGGDSGGSSGGSSGSETPGTSESATPESSGGSSGGSTLNIEDEYRLHETSKEPDVSLGSTWLSDFPQAWAETGGMGLAVRQAPLIIPLKATSTPVSIKQYPMSQEARLGIKPHIQRLLDQGILVPCQSPWNTPLLPVKKPGTNDYRPVQDLREVNKRVEDIHPTVPNPYNLLSGLPPSHQWYTVLDLKDAFFCLRLHPTSQPLFAFEWRDPEMGISGQLTWTRLPQGFKNSPTLFNEALHRDLADFRIQHPDLILLQYVDDLLLAATSELDCQQGTRALLQTLGNLGYRASAKKAQICQKQVKYLGYLLKEGQRWLTEARKETVMGQPTPKTPRQLREFLGKAGFCRLFIPGFAEMAAPLYPLTKPGTLFNWGPDQQKAYQEIKQALLTAPALGLPDLTKPFELFVDEKQGYAKGVLTQKLGPWRRPVAYLSKKLDPVAAGWPPCLRMVAAIAVLTKDAGKLTMGQPLVILAPHAVEALVKQPPDRWLSNARMTHYQALLLDTDRVQFGPVVALNPATLLPLPEEGLQHNCLDILAEAHG

SEQ ID NO: 195 - DNA, 5709 bp, synthetic construct
  misc_feature 1..5709: note = Description of Artificial Sequence: Synthetic polynucleotide
  source 1..5709: mol_type = other DNA
gacaagaagtacagcatcggcctggacatcggcaccaactctgtgggctgggccgtgatcaccgacgagtacaaggtgcccagcaagaaattcaaggtgctgggcaacaccgaccggcacagcatcaagaagaacctgatcggagccctgctgttcgacagcggcgaaacagccgaggccacccggctgaagagaaccgccagaagaagatacaccagacggaagaaccggatctgctatctgcaagagatcttcagcaacgagatggccaaggtggacgacagcttcttccacagactggaagagtccttcctggtggaagaggataagaagcacgagcggcaccccatcttcggcaacatcgtggacgaggtggcctaccacgagaagtaccccaccatctaccacctgagaaagaaactggtggacagcaccgacaaggccgacctgcggctgatctatctggccctggcccacatgatcaagttccggggccacttcctgatcgagggcgacctgaaccccgacaacagcgacgtggacaagctgttcatccagctggtgcagacctacaaccagctgttcgaggaaaaccccatcaacgccagcggcgtggacgccaaggccatcctgtctgccagactgagcaagagcagacggctggaaaatctgatcgcccagctgcccggcgagaagaagaatggcctgttcggaaacctgattgccctgagcctgggcctgacccccaacttcaagagcaacttcgacctggccgaggatgccaaactgcagctgagcaaggacacctacgacgacgacctggacaacctgctggcccagatcggcgaccagtacgccgacctgtttctggccgccaagaacctgtccgacgccatcctgctgagcgacatcctgagagtgaacaccgagatcaccaaggcccccctgagcgcctctatgatcaagagatacgacgagcaccaccaggacctgaccctgctgaaagctctcgtgcggcagcagctgcctgagaagtacaaagagattttcttcgaccagagcaagaacggctacgccggctacattgacggcggagccagccaggaagagttctacaagttcatcaagcccatcctggaaaagatggacggcaccgaggaactgctcgtgaagctgaacagagaggacctgctgcggaagcagcggaccttcgacaacggcagcatcccccaccagatccacctgggagagctgcacgccattctgcggcggcaggaagatttttacccattcctgaaggacaaccgggaaaagatcgagaagatcctgaccttccgcatcccctactacgtgggccctctggccaggggaaacagcagattcgcctggatgaccagaaagagcgaggaaaccatcaccccctggaacttcgaggaagtggtggacaagggcgcttccgcccagagcttcatcgagcggatgaccaacttcgataagaacctgcccaacgagaaggtgctgcccaagcacagcctgctgtacgagtacttcaccgtgtataacgagctgaccaaagtgaaatacgtgaccgagggaatgagaaagcccgccttcctgagcggcgagcagaaaaaggccatcgtggacctgctgttcaagaccaaccggaaagtgaccgtgaagcagctgaaagaggactacttcaagaaaatcgagtgcttcgactccgtggaaatctccggcgtggaagatcggttcaacgcctccctgggcacataccacgatctgctgaaaattatcaaggacaaggacttcctggacaatgaggaaaacgaggacattctggaagatatcgtgctgaccctgacactgtttgaggacagagagatgatcgaggaacggctgaaaacctatgcccacctgttcgacgacaaagtgatgaagcagctgaagcggcggagatacaccggctggggcaggctgagccggaagctgatcaacggcatccgggacaagcagtccggcaagacaatcctggatttcctgaagtccgacggcttcgccaacagaaacttcatgcagctgatccacgacgacagcctgacctttaaagaggacatccagaaagcccaggtgtccggccagggcgatagcctgcacgagcacattgccaatctggccggcagccccgccattaagaagggcatcctgcagacagtgaaggtggtggacgagctcgtgaaagtgatgggccggcacaagcccgagaacatcgtgatcgaaatggccagagagaaccagaccacccagaagggacagaagaacagccgcgagagaatgaagcggatcgaagagggcatcaaagagctgggcagccagatcctgaaagaacaccccgtggaaaacacccagctgcagaacgagaagctgtacctgtactacctgcagaatgggcgggatatgtacgtggaccaggaactggacatcaaccggctgtccgactacgatgtggacgctatcgtgcctcagagctttctgaaggacgactccatcgacaacaaggtgctgaccagaagcgacaagaaccggggcaagagcgacaacgtgccctccgaagaggtcgtgaagaagatgaagaactactggcggcagctgctgaacgccaagctgattacccagagaaagttcgacaatctgaccaaggccgagagaggcggcctgagcgaactggataaggccggcttcatcaagagacagctggtggaaacccggcagatcacaaagcacgtggcacagatcctggactcccggatgaacactaagtacgacgagaatgacaagctgatccgggaagtgaaagtgatcaccctgaagtccaagctggtgtccgatttccggaaggatttccagttttacaaagtgcgcgagatcaacaactaccaccacgcccacgacgcctacctgaacgccgtcgtgggaaccgccctgatcaaaaagtaccctaagctggaaagcgagttcgtgtacggcgactacaaggtgtacgacgtgcggaagatgatcgccaagagcgagcaggaaatcggcaaggctaccgccaagtacttcttctacagcaacatcatgaactttttcaagaccgagattaccctggccaacggcgagatccggaagcggcctctgatcgagacaaacggcgaaaccggggagatcgtgtgggataagggccgggattttgccaccgtgcggaaagtgctgagcatgccccaagtgaatatcgtgaaaaagaccgaggtgcagacaggcggcttcagcaaagagtctatcctgcccaagaggaacagcgataagctgatcgccagaaagaaggactgggaccctaagaagtacggcggcttcgacagccccaccgtggcctattctgtgctggtggtggccaaagtggaaaagggcaagtccaagaaactgaagagtgtgaaagagctgctggggatcaccatcatggaaagaagcagcttcgagaagaatcccatcgactttctggaagccaagggctacaaagaagtgaaaaaggacctgatcatcaagctgcctaagtactccctgttcgagctggaaaacggccggaagagaatgctggcctctgccggcgaactgcagaagggaaacgaactggccctgccctccaaatatgtgaacttcctgtacctggccagccactatgagaagctgaagggctcccccgaggataatgagcagaaacagctgtttgtggaacagcacaagcactacctggacgagatcatcgagcagatcagcgagttctccaagagagtgatcctggccgacgctaatctggacaaagtgctgtccgcctacaacaagcaccgggataagcccatcagagagcaggccgagaatatcatccacctgtttaccctgaccaatctgggagcccctgccgccttcaagtactttgacaccaccatcgaccggaagaggtacaccagcaccaaagaggtgctggacgccaccctgatccaccagagcatcaccggcctgtacgagacacggatcgacctgtctcagctgggaggtgactccggcggaagcagcggcggctcttctggcagcgagacacccggcaccagcgaaagcgccacccctgagagcagcggcggatctagcggcggctccaccctgaacatcgaggacgagtacaggctgcacgagaccagcaaggagcccgacgtgagcctgggcagcacctggctgagcgatttccctcaggcttgggccgagaccggcggcatgggcctggccgtgcggcaggcccccctgattatccccctgaaggccaccagcacccccgtgagcatcaagcagtacccaatgtcccaggaggccaggctgggcatcaagcctcacatccagaggctgctggaccagggcatcctggtgccatgccagtccccctggaacacccctctgctgcccgtgaagaagcctggcaccaacgactaccggcccgtgcaggacctgagagaagtgaacaagcgggtggaggacatccacccaaccgtgcccaacccttacaacctgctgtccggcctgccccccagccaccagtggtacaccgtgctggacctgaaggacgccttcttctgcctgagactgcaccccacctctcagcccctgttcgccttcgagtggcgcgaccccgagatgggcatcagcggccagctgacctggaccagactgccacagggctttaagaatagcccaaccctgtttaacgaggccctgcacagggacctggccgacttcaggatccagcaccccgacctgattctgctgcagtacgtggacgacctgctgctggccgctaccagcgagctggactgccagcagggcaccagagccctgctgcagaccctgggcaacctgggctacagagccagcgccaagaaggcccagatctgtcagaagcaggtgaagtatctgggctacctgctgaaggaaggccagagatggctgaccgaggccagaaaggagactgtgatgggccagcccacccccaagacccccaggcagctgcgggagttcctgggcaaggccggcttttgcagactgtttatccctggcttcgccgagatggccgccccactgtaccctctgaccaagcctggcaccctgtttaactggggccccgaccagcagaaggcctaccaggagatcaagcaggccctgctgaccgcccccgccctgggcctgcccgacctgaccaagcctttcgagctgttcgtggacgagaagcagggatacgccaaaggcgtgctgacccagaagctgggcccctggcggaggcccgtggcctacctgagcaaaaaactggaccctgtggccgccggctggcccccatgcctgcggatggtggccgccatcgctgtgctgaccaaggacgccggcaagctgaccatgggccagcccctggtgatcctggcccctcacgccgtggaggctctggtgaagcagcctccagacaggtggctgtccaacgccaggatgacccactaccaggccctgctgctggacaccgaccgggtgcagttcggccctgtggtggccctgaaccccgccaccctgctgcctctgccagaggagggcctgcagcacaactgcctggacatcctggccgaggcccacggc

SEQ ID NO: 196 - RNA, 5709 nt, synthetic construct
  misc_feature 1..5709: note = Description of Artificial Sequence: Synthetic polynucleotide
  source 1..5709: mol_type = other RNA
gacaagaagtacagcatcggcctggacatcggcaccaactctgtgggctgggccgtgatcaccgacgagtacaaggtgcccagcaagaaattcaaggtgctgggcaacaccgaccggcacagcatcaagaagaacctgatcggagccctgctgttcgacagcggcgaaacagccgaggccacccggctgaagagaaccgccagaagaagatacaccagacggaagaaccggatctgctatctgcaagagatcttcagcaacgagatggccaaggtggacgacagcttcttccacagactggaagagtccttcctggtggaagaggataagaagcacgagcggcaccccatcttcggcaacatcgtggacgaggtggcctaccacgagaagtaccccaccatctaccacctgagaaagaaactggtggacagcaccgacaaggccgacctgcggctgatctatctggccctggcccacatgatcaagttccggggccacttcctgatcgagggcgacctgaaccccgacaacagcgacgtggacaagctgttcatccagctggtgcagacctacaaccagctgttcgaggaaaaccccatcaacgccagcggcgtggacgccaaggccatcctgtctgccagactgagcaagagcagacggctggaaaatctgatcgcccagctgcccggcgagaagaagaatggcctgttcggaaacctgattgccctgagcctgggcctgacccccaacttcaagagcaacttcgacctggccgaggatgccaaactgcagctgagcaaggacacctacgacgacgacctggacaacctgctggcccagatcggcgaccagtacgccgacctgtttctggccgccaagaacctgtccgacgccatcctgctgagcgacatcctgagagtgaacaccgagatcaccaaggcccccctgagcgcctctatgatcaagagatacgacgagcaccaccaggacctgaccctgctgaaagctctcgtgcggcagcagctgcctgagaagtacaaagagattttcttcgaccagagcaagaacggctacgccggctacattgacggcggagccagccaggaagagttctacaagttcatcaagcccatcctggaaaagatggacggcaccgaggaactgctcgtgaagctgaacagagaggacctgctgcggaagcagcggaccttcgacaacggcagcatcccccaccagatccacctgggagagctgcacgccattctgcggcggcaggaagatttttacccattcctgaaggacaaccgggaaaagatcgagaagatcctgaccttccgcatcccctactacgtgggccctctggccaggggaaacagcagattcgcctggatgaccagaaagagcgaggaaaccatcaccccctggaacttcgaggaagtggtggacaagggcgcttccgcccagagcttcatcgagcggatgaccaacttcgataagaacctgcccaacgagaaggtgctgcccaagcacagcctgctgtacgagtacttcaccgtgtataacgagctgaccaaagtgaaatacgtgaccgagggaatgagaaagcccgccttcctgagcggcgagcagaaaaaggccatcgtggacctgctgttcaagaccaaccggaaagtgaccgtgaagcagctgaaagaggactacttcaagaaaatcgagtgcttcgactccgtggaaatctccggcgtggaagatcggttcaacgcctccctgggcacataccacgatctgctgaaaattatcaaggacaaggacttcctggacaatgaggaaaacgaggacattctggaagatatcgtgctgaccctgacactgtttgaggacagagagatgatcgaggaacggctgaaaacctatgcccacctgttcgacgacaaagtgatgaagcagctgaagcggcggagatacaccggctggggcaggctgagccggaagctgatcaacggcatccgggacaagcagtccggcaagacaatcctggatttcctgaagtccgacggcttcgccaacagaaacttcatgcagctgatccacgacgacagcctgacctttaaagaggacatccagaaagcccaggtgtccggccagggcgatagcctgcacgagcacattgccaatctggccggcagccccgccattaagaagggcatcctgcagacagtgaaggtggtggacgagctcgtgaaagtgatgggccggcacaagcccgagaacatcgtgatcgaaatggccagagagaaccagaccacccagaagggacagaagaacagccgcgagagaatgaagcggatcgaagagggcatcaaagagctgggcagccagatcctgaaagaacaccccgtggaaaacacccagctgcagaacgagaagctgtacctgtactacctgcagaatgggcgggatatgtacgtggaccaggaactggacatcaaccggctgtccgactacgatgtggacgctatcgtgcctcagagctttctgaaggacgactccatcgacaacaaggtgctgaccagaagcgacaagaaccggggcaagagcgacaacgtgccctccgaagaggtcgtgaagaagatgaagaactactggcggcagctgctgaacgccaagctgattacccagagaaagttcgacaatctgaccaaggccgagagaggcggcctgagcgaactggataaggccggcttcatcaagagacagctggtggaaacccggcagatcacaaagcacgtggcacagatcctggactcccggatgaacactaagtacgacgagaatgacaagctgatccgggaagtgaaagtgatcaccctgaagtccaagctggtgtccgatttccggaaggatttccagttttacaaagtgcgcgagatcaacaactaccaccacgcccacgacgcctacctgaacgccgtcgtgggaaccgccctgatcaaaaagtaccctaagctggaaagcgagttcgtgtacggcgactacaaggtgtacgacgtgcggaagatgatcgccaagagcgagcaggaaatcggcaaggctaccgccaagtacttcttctacagcaacatcatgaactttttcaagaccgagattaccctggccaacggcgagatccggaagcggcctctgatcgagacaaacggcgaaaccggggagatcgtgtgggataagggccgggattttgccaccgtgcggaaagtgctgagcatgccccaagtgaatatcgtgaaaaagaccgaggtgcagacaggcggcttcagcaaagagtctatcctgcccaagaggaacagcgataagctgatcgccagaaagaaggactgggaccctaagaagtacggcggcttcgacagccccaccgtggcctattctgtgctggtggtggccaaagtggaaaagggcaagtccaagaaactgaagagtgtgaaagagctgctggggatcaccatcatggaaagaagcagcttcgagaagaatcccatcgactttctggaagccaagggctacaaagaagtgaaaaaggacctgatcatcaagctgcctaagtactccctgttcgagctggaaaacggccggaagagaatgctggcctctgccggcgaactgcagaagggaaacgaactggccctgccctccaaatatgtgaacttcctgtacctggccagccactatgagaagctgaagggctcccccgaggataatgagcagaaacagctgtttgtggaacagcacaagcactacctggacgagatcatcgagcagatcagcgagttctccaagagagtgatcctggccgacgctaatctggacaaagtgctgtccgcctacaacaagcaccgggataagcccatcagagagcaggccgagaatatcatccacctgtttaccctgaccaatctgggagcccctgccgccttcaagtactttgacaccaccatcgaccggaagaggtacaccagcaccaaagaggtgctggacgccaccctgatccaccagagcatcaccggcctgtacgagacacggatcgacctgtctcagctgggaggtgactccggcggaagcagcggcggctcttctggcagcgagacacccggcaccagcgaaagcgccacccctgagagcagcggcggatctagcggcggctccaccctgaacatcgaggacgagtacaggctgcacgagaccagcaaggagcccgacgtgagcctgggcagcacctggctgagcgatttccctcaggcttgggccgagaccggcggcatgggcctggccgtgcggcaggcccccctgattatccccctgaaggccaccagcacccccgtgagcatcaagcagtacccaatgtcccaggaggccaggctgggcatcaagcctcacatccagaggctgctggaccagggcatcctggtgccatgccagtccccctggaacacccctctgctgcccgtgaagaagcctggcaccaacgactaccggcccgtgcaggacctgagagaagtgaacaagcgggtggaggacatccacccaaccgtgcccaacccttacaacctgctgtccggcctgccccccagccaccagtggtacaccgtgctggacctgaaggacgccttcttctgcctgagactgcaccccacctctcagcccctgttcgccttcgagtggcgcgaccccgagatgggcatcagcggccagctgacctggaccagactgccacagggctttaagaatagcccaaccctgtttaacgaggccctgcacagggacctggccgacttcaggatccagcaccccgacctgattctgctgcagtacgtggacgacctgctgctggccgctaccagcgagctggactgccagcagggcaccagagccctgctgcagaccctgggcaacctgggctacagagccagcgccaagaaggcccagatctgtcagaagcaggtgaagtatctgggctacctgctgaaggaaggccagagatggctgaccgaggccagaaaggagactgtgatgggccagcccacccccaagacccccaggcagctgcgggagttcctgggcaaggccggcttttgcagactgtttatccctggcttcgccgagatggccgccccactgtaccctctgaccaagcctggcaccctgtttaactggggccccgaccagcagaaggcctaccaggagatcaagcaggccctgctgaccgcccccgccctgggcctgcccgacctgaccaagcctttcgagctgttcgtggacgagaagcagggatacgccaaaggcgtgctgacccagaagctgggcccctggcggaggcccgtggcctacctgagcaaaaaactggaccctgtggccgccggctggcccccatgcctgcggatggtggccgccatcgctgtgctgaccaaggacgccggcaagctgaccatgggccagcccctggtgatcctggcccctcacgccgtggaggctctggtgaagcagcctccagacaggtggctgtccaacgccaggatgacccactaccaggccctgctgctggacaccgaccgggtgcagttcggccctgtggtggccctgaaccccgccaccctgctgcctctgccagaggagggcctgcagcacaactgcctggacatcctggccgaggcccacggc

SEQ ID NO: 197 - protein, 2060 aa, synthetic construct
  REGION 1..2060: note = Description of Artificial Sequence: Synthetic polypeptide
DKKYSIGLDIGTNSVGWAVITDEYKVPSKKFKVLGNTDRHSIKKNLIGALLFDSGETAEATRLKRTARRRYTRRKNRICYLQEIFSNEMAKVDDSFFHRLEESFLVEEDKKHERHPIFGNIVDEVAYHEKYPTIYHLRKKLVDSTDKADLRLIYLALAHMIKFRGHFLIEGDLNPDNSDVDKLFIQLVQTYNQLFEENPINASGVDAKAILSARLSKSRRLENLIAQLPGEKKNGLFGNLIALSLGLTPNFKSNFDLAEDAKLQLSKDTYDDDLDNLLAQIGDQYADLFLAAKNLSDAILLSDILRVNTEITKAPLSASMIKRYDEHHQDLTLLKALVRQQLPEKYKEIFFDQSKNGYAGYIDGGASQEEFYKFIKPILEKMDGTEELLVKLNREDLLRKQRTFDNGSIPHQIHLGELHAILRRQEDFYPFLKDNREKIEKILTFRIPYYVGPLARGNSRFAWMTRKSEETITPWNFEEVVDKGASAQSFIERMTNFDKNLPNEKVLPKHSLLYEYFTVYNELTKVKYVTEGMRKPAFLSGEQKKAIVDLLFKTNRKVTVKQLKEDYFKKIECFDSVEISGVEDRFNASLGTYHDLLKIIKDKDFLDNEENEDILEDIVLTLTLFEDREMIEERLKTYAHLFDDKVMKQLKRRRYTGWGRLSRKLINGIRDKQSGKTILDFLKSDGFANRNFMQLIHDDSLTFKEDIQKAQVSGQGDSLHEHIANLAGSPAIKKGILQTVKVVDELVKVMGRHKPENIVIEMARENQTTQKGQKNSRERMKRIEEGIKELGSQILKEHPVENTQLQNEKLYLYYLQNGRDMYVDQELDINRLSDYDVDAIVPQSFLKDDSIDNKVLTRSDKNRGKSDNVPSEEVVKKMKNYWRQLLNAKLITQRKFDNLTKAERGGLSELDKAGFIKRQLVETRQITKHVAQILDSRMNTKYDENDKLIREVKVITLKSKLVSDFRKDFQFYKVREINNYHHAHDAYLNAVVGTALIKKYPKLESEFVYGDYKVYDVRKMIAKSEQEIGKATAKYFFYSNIMNFFKTEITLANGEIRKRPLIETNGETGEIVWDKGRDFATVRKVLSMPQVNIVKKTEVQTGGFSKESILPKRNSDKLIARKKDWDPKKYGGFDSPTVAYSVLVVAKVEKGKSKKLKSVKELLGITIMERSSFEKNPIDFLEAKGYKEVKKDLIIKLPKYSLFELENGRKRMLASAGELQKGNELALPSKYVNFLYLASHYEKLKGSPEDNEQKQLFVEQHKHYLDEIIEQISEFSKRVILADANLDKVLSAYNKHRDKPIREQAENIIHLFTLTNLGAPAAFKYFDTTIDRKRYTSTKEVLDATLIHQSITGLYETRIDLSQLGGDSGGSSGGSSGGSSGGSTLNIEDEYRLHETSKEPDVSLGSTWLSDFPQAWAETGGMGLAVRQAPLIIPLKATSTPVSIKQYPMSQEARLGIKPHIQRLLDQGILVPCQSPWNTPLLPVKKPGTNDYRPVQDLREVNKRVEDIHPTVPNPYNLLSGLPPSHQWYTVLDLKDAFFCLRLHPTSQPLFAFEWRDPEMGISGQLTWTRLPQGFKNSPTLFNEALHRDLADFRIQHPDLILLQYVDDLLLAATSELDCQQGTRALLQTLGNLGYRASAKKAQICQKQVKYLGYLLKEGQRWLTEARKETVMGQPTPKTPRQLREFLGKAGFCRLFIPGFAEMAAPLYPLTKPGTLFNWGPDQQKAYQEIKQALLTAPALGLPDLTKPFELFVDEKQGYAKGVLTQKLGPWRRPVAYLSKKLDPVAAGWPPCLRMVAAIAVLTKDAGKLTMGQPLVILAPHAVEALVKQPPDRWLSNARMTHYQALLLDTDRVQFGPVVALNPATLLPLPEEGLQHNCLDILAEAHGTRPDLTDQPLPDADHTWYTDGSSLLQEGQRKAGAAVTTETEVIWAKALPAGTSAQRAELIALTQALKMAEGKKLNVYTDSRYAFATAHIHGEIYRRRGWLTSEGKEIKNKDEILALLKALFLPKRLSIIHCPGHQKGHSAEARGNRMADQAARKAAITETPDTSTLLIENSSP

SEQ ID NO: 198 - DNA, 6180 bp, synthetic construct
  misc_feature 1..6180: note = Description of Artificial Sequence: Synthetic polynucleotide
  source 1..6180: mol_type = other DNA
gacaagaagtacagcatcggcctggacatcggcaccaactctgtgggctgggccgtgatcaccgacgagtacaaggtgcccagcaagaaattcaaggtgctgggcaacaccgaccggcacagcatcaagaagaacctgatcggagccctgctgttcgacagcggcgaaacagccgaggccacccggctgaagagaaccgccagaagaagatacaccagacggaagaaccggatctgctatctgcaagagatcttcagcaacgagatggccaaggtggacgacagcttcttccacagactggaagagtccttcctggtggaagaggataagaagcacgagcggcaccccatcttcggcaacatcgtggacgaggtggcctaccacgagaagtaccccaccatctaccacctgagaaagaaactggtggacagcaccgacaaggccgacctgcggctgatctatctggccctggcccacatgatcaagttccggggccacttcctgatcgagggcgacctgaaccccgacaacagcgacgtggacaagctgttcatccagctggtgcagacctacaaccagctgttcgaggaaaaccccatcaacgccagcggcgtggacgccaaggccatcctgtctgccagactgagcaagagcagacggctggaaaatctgatcgcccagctgcccggcgagaagaagaatggcctgttcggaaacctgattgccctgagcctgggcctgacccccaacttcaagagcaacttcgacctggccgaggatgccaaactgcagctgagcaaggacacctacgacgacgacctggacaacctgctggcccagatcggcgaccagtacgccgacctgtttctggccgccaagaacctgtccgacgccatcctgctgagcgacatcctgagagtgaacaccgagatcaccaaggcccccctgagcgcctctatgatcaagagatacgacgagcaccaccaggacctgaccctgctgaaagctctcgtgcggcagcagctgcctgagaagtacaaagagattttcttcgaccagagcaagaacggctacgccggctacattgacggcggagccagccaggaagagttctacaagttcatcaagcccatcctggaaaagatggacggcaccgaggaactgctcgtgaagctgaacagagaggacctgctgcggaagcagcggaccttcgacaacggcagcatcccccaccagatccacctgggagagctgcacgccattctgcggcggcaggaagatttttacccattcctgaaggacaaccgggaaaagatcgagaagatcctgaccttccgcatcccctactacgtgggccctctggccaggggaaacagcagattcgcctggatgaccagaaagagcgaggaaaccatcaccccctggaacttcgaggaagtggtggacaagggcgcttccgcccagagcttcatcgagcggatgaccaacttcgataagaacctgcccaacgagaaggtgctgcccaagcacagcctgctgtacgagtacttcaccgtgtataacgagctgaccaaagtgaaatacgtgaccgagggaatgagaaagcccgccttcctgagcggcgagcagaaaaaggccatcgtggacctgctgttcaagaccaaccggaaagtgaccgtgaagcagctgaaagaggactacttcaagaaaatcgagtgcttcgactccgtggaaatctccggcgtggaagatcggttcaacgcctccctgggcacataccacgatctgctgaaaattatcaaggacaaggacttcctggacaatgaggaaaacgaggacattctggaagatatcgtgctgaccctgacactgtttgaggacagagagatgatcgaggaacggctgaaaacctatgcccacctgttcgacgacaaagtgatgaagcagctgaagcggcggagatacaccggctggggcaggctgagccggaagctgatcaacggcatccgggacaagcagtccggcaagacaatcctggatttcctgaagtccgacggcttcgccaacagaaacttcatgcagctgatccacgacgacagcctgacctttaaagaggacatccagaaagcccaggtgtccggccagggcgatagcctgcacgagcacattgccaatctggccggcagccccgccattaagaagggcatcctgcagacagtgaaggtggtggacgagctcgtgaaagtgatgggccggcacaagcccgagaacatcgtgatcgaaatggccagagagaaccagaccacccagaagggacagaagaacagccgcgagagaatgaagcggatcgaagagggcatcaaagagctgggcagccagatcctgaaagaacaccccgtggaaaacacccagctgcagaacgagaagctgtacctgtactacctgcagaatgggcgggatatgtacgtggaccaggaactggacatcaaccggctgtccgactacgatgtggacgctatcgtgcctcagagctttctgaaggacgactccatcgacaacaaggtgctgaccagaagcgacaagaaccggggcaagagcgacaacgtgccctccgaagaggtcgtgaagaagatgaagaactactggcggcagctgctgaacgccaagctgattacccagagaaagttcgacaatctgaccaaggccgagagaggcggcctgagcgaactggataaggccggcttcatcaagagacagctggtggaaacccggcagatcacaaagcacgtggcacagatcctggactcccggatgaacactaagtacgacgagaatgacaagctgatccgggaagtgaaagtgatcaccctgaagtccaagctggtgtccgatttccggaaggatttccagttttacaaagtgcgcgagatcaacaactaccaccacgcccacgacgcctacctgaacgccgtcgtgggaaccgccctgatcaaaaagtaccctaagctggaaagcgagttcgtgtacggcgactacaaggtgtacgacgtgcggaagatgatcgccaagagcgagcaggaaatcggcaaggctaccgccaagtacttcttctacagcaacatcatgaactttttcaagaccgagattaccctggccaacggcgagatccggaagcggcctctgatcgagacaaacggcgaaaccggggagatcgtgtgggataagggccgggattttgccaccgtgcggaaagtgctgagcatgccccaagtgaatatcgtgaaaaagaccgaggtgcagacaggcggcttcagcaaagagtctatcctgcccaagaggaacagcgataagctgatcgccagaaagaaggactgggaccctaagaagtacggcggcttcgacagccccaccgtggcctattctgtgctggtggtggccaaagtggaaaagggcaagtccaagaaactgaagagtgtgaaagagctgctggggatcaccatcatggaaagaagcagcttcgagaagaatcccatcgactttctggaagccaagggctacaaagaagtgaaaaaggacctgatcatcaagctgcctaagtactccctgttcgagctggaaaacggccggaagagaatgctggcctctgccggcgaactgcagaagggaaacgaactggccctgccctccaaatatgtgaacttcctgtacctggccagccactatgagaagctgaagggctcccccgaggataatgagcagaaacagctgtttgtggaacagcacaagcactacctggacgagatcatcgagcagatcagcgagttctccaagagagtgatcctggccgacgctaatctggacaaagtgctgtccgcctacaacaagcaccgggataagcccatcagagagcaggccgagaatatcatccacctgtttaccctgaccaatctgggagcccctgccgccttcaagtactttgacaccaccatcgaccggaagaggtacaccagcaccaaagaggtgctggacgccaccctgatccaccagagcatcaccggcctgtacgagacacggatcgacctgtctcagctgggaggtgactccggcggcagcagcggcggcagcagcggcggatctagcggcggatctaccctgaacatcgaggacgagtacaggctgcacgagaccagcaaggagcccgacgtgagcctgggcagcacctggctgagcgatttccctcaggcttgggccgagaccggcggcatgggcctggccgtgcggcaggcccccctgattatccccctgaaggccaccagcacccccgtgagcatcaagcagtacccaatgtcccaggaggccaggctgggcatcaagcctcacatccagaggctgctggaccagggcatcctggtgccatgccagtccccctggaacacccctctgctgcccgtgaagaagcctggcaccaacgactaccggcccgtgcaggacctgagagaagtgaacaagcgggtggaggacatccacccaaccgtgcccaacccttacaacctgctgtccggcctgccccccagccaccagtggtacaccgtgctggacctgaaggacgccttcttctgcctgagactgcaccccacctctcagcccctgttcgccttcgagtggcgcgaccccgagatgggcatcagcggccagctgacctggaccagactgccacagggctttaagaatagcccaaccctgtttaacgaggccctgcacagggacctggccgacttcaggatccagcaccccgacctgattctgctgcagtacgtggacgacctgctgctggccgctaccagcgagctggactgccagcagggcaccagagccctgctgcagaccctgggcaacctgggctacagagccagcgccaagaaggcccagatctgtcagaagcaggtgaagtatctgggctacctgctgaaggaaggccagagatggctgaccgaggccagaaaggagactgtgatgggccagcccacccccaagacccccaggcagctgcgggagttcctgggcaaggccggcttttgcagactgtttatccctggcttcgccgagatggccgccccactgtaccctctgaccaagcctggcaccctgtttaactggggccccgaccagcagaaggcctaccaggagatcaagcaggccctgctgaccgcccccgccctgggcctgcccgacctgaccaagcctttcgagctgttcgtggacgagaagcagggatacgccaaaggcgtgctgacccagaagctgggcccctggcggaggcccgtggcctacctgagcaaaaaactggaccctgtggccgccggctggcccccatgcctgcggatggtggccgccatcgctgtgctgaccaaggacgccggcaagctgaccatgggccagcccctggtgatcctggcccctcacgccgtggaggctctggtgaagcagcctccagacaggtggctgtccaacgccaggatgacccactaccaggccctgctgctggacaccgaccgggtgcagttcggccctgtggtggccctgaaccccgccaccctgctgcctctgccagaggagggcctgcagcacaactgcctggacatcctggccgaggcccacggcaccaggcccgacctgaccgaccagcccctgcctgacgccgaccacacctggtacaccgacggcagctccctgctgcaggagggccagaggaaggccggcgccgccgtgaccaccgagaccgaggtgatctgggccaaagccctgcctgccggcacctccgcccagcgggccgagctgatcgccctgacccaggccctgaagatggctgagggcaagaagctgaacgtgtacaccgattccagatacgccttcgccaccgcccacatccacggcgagatctacagaagaaggggctggctgacctccgagggcaaggagatcaagaacaaggacgagattctggccctgctgaaggccctgttcctgcctaagagactgagcatcatccactgtcccggccaccagaagggccacagcgccgaggccagaggcaatagaatggccgaccaggccgccagaaaggccgccatcaccgagacccccgacaccagcaccctgctgatcgagaacagcagcccc

SEQ ID NO: 199 - RNA, 6180 nt, synthetic construct
  misc_feature 1..6180: note = Description of Artificial Sequence: Synthetic polynucleotide
  source 1..6180: mol_type = other RNA
gacaagaagtacagcatcggcctggacatcggcaccaactctgtgggctgggccgtgatcaccgacgagtacaaggtgcccagcaagaaattcaaggtgctgggcaacaccgaccggcacagcatcaagaagaacctgatcggagccctgctgttcgacagcggcgaaacagccgaggccacccggctgaagagaaccgccagaagaagatacaccagacggaagaaccggatctgctatctgcaagagatcttcagcaacgagatggccaaggtggacgacagcttcttccacagactggaagagtccttcctggtggaagaggataagaagcacgagcggcaccccatcttcggcaacatcgtggacgaggtggcctaccacgagaagtaccccaccatctaccacctgagaaagaaactggtggacagcaccgacaaggccgacctgcggctgatctatctggccctggcccacatgatcaagttccggggccacttcctgatcgagggcgacctgaaccccgacaacagcgacgtggacaagctgttcatccagctggtgcagacctacaaccagctgttcgaggaaaaccccatcaacgccagcggcgtggacgccaaggccatcctgtctgccagactgagcaagagcagacggctggaaaatctgatcgcccagctgcccggcgagaagaagaatggcctgttcggaaacctgattgccctgagcctgggcctgacccccaacttcaagagcaacttcgacctggccgaggatgccaaactgcagctgagcaaggacacctacgacgacgacctggacaacctgctggcccagatcggcgaccagtacgccgacctgtttctggccgccaagaacctgtccgacgccatcctgctgagcgacatcctgagagtgaacaccgagatcaccaaggcccccctgagcgcctctatgatcaagagatacgacgagcaccaccaggacctgaccctgctgaaagctctcgtgcggcagcagctgcctgagaagtacaaagagattttcttcgaccagagcaagaacggctacgccggctacattgacggcggagccagccaggaagagttctacaagttcatcaagcccatcctggaaaagatggacggcaccgaggaactgctcgtgaagctgaacagagaggacctgctgcggaagcagcggaccttcgacaacggcagcatcccccaccagatccacctgggagagctgcacgccattctgcggcggcaggaagatttttacccattcctgaaggacaaccgggaaaagatcgagaagatcctgaccttccgcatcccctactacgtgggccctctggccaggggaaacagcagattcgcctggatgaccagaaagagcgaggaaaccatcaccccctggaacttcgaggaagtggtggacaagggcgcttccgcccagagcttcatcgagcggatgaccaacttcgataagaacctgcccaacgagaaggtgctgcccaagcacagcctgctgtacgagtacttcaccgtgtataacgagctgaccaaagtgaaatacgtgaccgagggaatgagaaagcccgccttcctgagcggcgagcagaaaaaggccatcgtggacctgctgttcaagaccaaccggaaagtgaccgtgaagcagctgaaagaggactacttcaagaaaatcgagtgcttcgactccgtggaaatctccggcgtggaagatcggttcaacgcctccctgggcacataccacgatctgctgaaaattatcaaggacaaggacttcctggacaatgaggaaaacgaggacattctggaagatatcgtgctgaccctgacactgtttgaggacagagagatgatcgaggaacggctgaaaacctatgcccacctgttcgacgacaaagtgatgaagcagctgaagcggcggagatacaccggctggggcaggctgagccggaagctgatcaacggcatccgggacaagcagtccggcaagacaatcctggatttcctgaagtccgacggcttcgccaacagaaacttcatgcagctgatccacgacgacagcctgacctttaaagaggacatccagaaagcccaggtgtccggccagggcgatagcctgcacgagcacattgccaatctggccggcagccccgccattaagaagggcatcctgcagacagtgaaggtggtggacgagctcgtgaaagtgatgggccggcacaagcccgagaacatcgtgatcgaaatggccagagagaaccagaccacccagaagggacagaagaacagccgcgagagaatgaagcggatcgaagagggcatcaaagagctgggcagccagatcctgaaagaacaccccgtggaaaacacccagctgcagaacgagaagctgtacctgtactacctgcagaatgggcgggatatgtacgtggaccaggaactggacatcaaccggctgtccgactacgatgtggacgctatcgtgcctcagagctttctgaaggacgactccatcgacaacaaggtgctgaccagaagcgacaagaaccggggcaagagcgacaacgtgccctccgaagaggtcgtgaagaagatgaagaactactggcggcagctgctgaacgccaagctgattacccagagaaagttcgacaatctgaccaaggccgagagaggcggcctgagcgaactggataaggccggcttcatcaagagacagctggtggaaacccggcagatcacaaagcacgtggcacagatcctggactcccggatgaacactaagtacgacgagaatgacaagctgatccgggaagtgaaagtgatcaccctgaagtccaagctggtgtccgatttccggaaggatttccagttttacaaagtgcgcgagatcaacaactaccaccacgcccacgacgcctacctgaacgccgtcgtgggaaccgccctgatcaaaaagtaccctaagctggaaagcgagttcgtgtacggcgactacaaggtgtacgacgtgcggaagatgatcgccaagagcgagcaggaaatcggcaaggctaccgccaagtacttcttctacagcaacatcatgaactttttcaagaccgagattaccctggccaacggcgagatccggaagcggcctctgatcgagacaaacggcgaaaccggggagatcgtgtgggataagggccgggattttgccaccgtgcggaaagtgctgagcatgccccaagtgaatatcgtgaaaaagaccgaggtgcagacaggcggcttcagcaaagagtctatcctgcccaagaggaacagcgataagctgatcgccagaaagaaggactgggaccctaagaagtacggcggcttcgacagccccaccgtggcctattctgtgctggtggtggccaaagtggaaaagggcaagtccaagaaactgaagagtgtgaaagagctgctggggatcaccatcatggaaagaagcagcttcgagaagaatcccatcgactttctggaagccaagggctacaaagaagtgaaaaaggacctgatcatcaagctgcctaagtactccctgttcgagctggaaaacggccggaagagaatgctggcctctgccggcgaactgcagaagggaaacgaactggccctgccctccaaatatgtgaacttcctgtacctggccagccactatgagaagctgaagggctcccccgaggataatgagcagaaacagctgtttgtggaacagcacaagcactacctggacgagatcatcgagcagatcagcgagttctccaagagagtgatcctggccgacgctaatctggacaaagtgctgtccgcctacaacaagcaccgggataagcccatcagagagcaggccgagaatatcatccacctgtttaccctgaccaatctgggagcccctgccgccttcaagtactttgacaccaccatcgaccggaagaggtacaccagcaccaaagaggtgctggacgccaccctgatccaccagagcatcaccggcctgtacgagacacggatcgacctgtctcagctgggaggtgactccggcggcagcagcggcggcagcagcggcggatctagcggcggatctaccctgaacatcgaggacgagtacaggctgcacgagaccagcaaggagcccgacgtgagcctgggcagcacctggctgagcgatttccctcaggcttgggccgagaccggcggcatgggcctggccgtgcggcaggcccccctgattatccccctgaaggccaccagcacccccgtgagcatcaagcagtacccaatgtcccaggaggccaggctgggcatcaagcctcacatccagaggctgctggaccagggcatcctggtgccatgccagtccccctggaacacccctctgctgcccgtgaagaagcctggcaccaacgactaccggcccgtgcaggacctgagagaagtgaacaagcgggtggaggacatccacccaaccgtgcccaacccttacaacctgctgtccggcctgccccccagccaccagtggtacaccgtgctggacctgaaggacgccttcttctgcctgagactgcaccccacctctcagcccctgttcgccttcgagtggcgcgaccccgagatgggcatcagcggccagctgacctggaccagactgccacagggctttaagaatagcccaaccctgtttaacgaggccctgcacagggacctggccgacttcaggatccagcaccccgacctgattctgctgcagtacgtggacgacctgctgctggccgctaccagcgagctggactgccagcagggcaccagagccctgctgcagaccctgggcaacctgggctacagagccagcgccaagaaggcccagatctgtcagaagcaggtgaagtatctgggctacctgctgaaggaaggccagagatggctgaccgaggccagaaaggagactgtgatgggccagcccacccccaagacccccaggcagctgcgggagttcctgggcaaggccggcttttgcagactgtttatccctggcttcgccgagatggccgccccactgtaccctctgaccaagcctggcaccctgtttaactggggccccgaccagcagaaggcctaccaggagatcaagcaggccctgctgaccgcccccgccctgggcctgcccgacctgaccaagcctttcgagctgttcgtggacgagaagcagggatacgccaaaggcgtgctgacccagaagctgggcccctggcggaggcccgtggcctacctgagcaaaaaactggaccctgtggccgccggctggcccccatgcctgcggatggtggccgccatcgctgtgctgaccaaggacgccggcaagctgaccatgggccagcccctggtgatcctggcccctcacgccgtggaggctctggtgaagcagcctccagacaggtggctgtccaacgccaggatgacccactaccaggccctgctgctggacaccgaccgggtgcagttcggccctgtggtggccctgaaccccgccaccctgctgcctctgccagaggagggcctgcagcacaactgcctggacatcctggccgaggcccacggcaccaggcccgacctgaccgaccagcccctgcctgacgccgaccacacctggtacaccgacggcagctccctgctgcaggagggccagaggaaggccggcgccgccgtgaccaccgagaccgaggtgatctgggccaaagccctgcctgccggcacctccgcccagcgggccgagctgatcgccctgacccaggccctgaagatggctgagggcaagaagctgaacgtgtacaccgattccagatacgccttcgccaccgcccacatccacggcgagatctacagaagaaggggctggctgacctccgagggcaaggagatcaagaacaaggacgagattctggccctgctgaaggccctgttcctgcctaagagactgagcatcatccactgtcccggccaccagaagggccacagcgccgaggccagaggcaatagaatggccgaccaggccgccagaaaggccgccatcaccgagacccccgacaccagcaccctgctgatcgagaacagcagcccc

SEQ ID NO: 200 - protein, 1887 aa, synthetic construct
  REGION 1..1887: note = Description of Artificial Sequence: Synthetic polypeptide
DKKYSIGLDIGTNSVGWAVITDEYKVPSKKFKVLGNTDRHSIKKNLIGALLFDSGETAEATRLKRTARRRYTRRKNRICYLQEIFSNEMAKVDDSFFHRLEESFLVEEDKKHERHPIFGNIVDEVAYHEKYPTIYHLRKKLVDSTDKADLRLIYLALAHMIKFRGHFLIEGDLNPDNSDVDKLFIQLVQTYNQLFEENPINASGVDAKAILSARLSKSRRLENLIAQLPGEKKNGLFGNLIALSLGLTPNFKSNFDLAEDAKLQLSKDTYDDDLDNLLAQIGDQYADLFLAAKNLSDAILLSDILRVNTEITKAPLSASMIKRYDEHHQDLTLLKALVRQQLPEKYKEIFFDQSKNGYAGYIDGGASQEEFYKFIKPILEKMDGTEELLVKLNREDLLRKQRTFDNGSIPHQIHLGELHAILRRQEDFYPFLKDNREKIEKILTFRIPYYVGPLARGNSRFAWMTRKSEETITPWNFEEVVDKGASAQSFIERMTNFDKNLPNEKVLPKHSLLYEYFTVYNELTKVKYVTEGMRKPAFLSGEQKKAIVDLLFKTNRKVTVKQLKEDYFKKIECFDSVEISGVEDRFNASLGTYHDLLKIIKDKDFLDNEENEDILEDIVLTLTLFEDREMIEERLKTYAHLFDDKVMKQLKRRRYTGWGRLSRKLINGIRDKQSGKTILDFLKSDGFANRNFMQLIHDDSLTFKEDIQKAQVSGQGDSLHEHIANLAGSPAIKKGILQTVKVVDELVKVMGRHKPENIVIEMARENQTTQKGQKNSRERMKRIEEGIKELGSQILKEHPVENTQLQNEKLYLYYLQNGRDMYVDQELDINRLSDYDVDAIVPQSFLKDDSIDNKVLTRSDKNRGKSDNVPSEEVVKKMKNYWRQLLNAKLITQRKFDNLTKAERGGLSELDKAGFIKRQLVETRQITKHVAQILDSRMNTKYDENDKLIREVKVITLKSKLVSDFRKDFQFYKVREINNYHHAHDAYLNAVVGTALIKKYPKLESEFVYGDYKVYDVRKMIAKSEQEIGKATAKYFFYSNIMNFFKTEITLANGEIRKRPLIETNGETGEIVWDKGRDFATVRKVLSMPQVNIVKKTEVQTGGFSKESILPKRNSDKLIARKKDWDPKKYGGFDSPTVAYSVLVVAKVEKGKSKKLKSVKELLGITIMERSSFEKNPIDFLEAKGYKEVKKDLIIKLPKYSLFELENGRKRMLASAGELQKGNELALPSKYVNFLYLASHYEKLKGSPEDNEQKQLFVEQHKHYLDEIIEQISEFSKRVILADANLDKVLSAYNKHRDKPIREQAENIIHLFTLTNLGAPAAFKYFDTTIDRKRYTSTKEVLDATLIHQSITGLYETRIDLSQLGGDSGGSSGGSSGGSSGGSTLNIEDEYRLHETSKEPDVSLGSTWLSDFPQAWAETGGMGLAVRQAPLIIPLKATSTPVSIKQYPMSQEARLGIKPHIQRLLDQGILVPCQSPWNTPLLPVKKPGTNDYRPVQDLREVNKRVEDIHPTVPNPYNLLSGLPPSHQWYTVLDLKDAFFCLRLHPTSQPLFAFEWRDPEMGISGQLTWTRLPQGFKNSPTLFNEALHRDLADFRIQHPDLILLQYVDDLLLAATSELDCQQGTRALLQTLGNLGYRASAKKAQICQKQVKYLGYLLKEGQRWLTEARKETVMGQPTPKTPRQLREFLGKAGFCRLFIPGFAEMAAPLYPLTKPGTLFNWGPDQQKAYQEIKQALLTAPALGLPDLTKPFELFVDEKQGYAKGVLTQKLGPWRRPVAYLSKKLDPVAAGWPPCLRMVAAIAVLTKDAGKLTMGQPLVILAPHAVEALVKQPPDRWLSNARMTHYQALLLDTDRVQFGPVVALNPATLLPLPEEGLQHNCLDILAEAHG

SEQ ID NO: 201 - DNA, 5661 bp, synthetic construct
  misc_feature 1..5661: note = Description of Artificial Sequence: Synthetic polynucleotide
  source 1..5661: mol_type = other DNA
gacaagaagtacagcatcggcctggacatcggcaccaactctgtgggctgggccgtgatcaccgacgagtacaaggtgcccagcaagaaattcaaggtgctgggcaacaccgaccggcacagcatcaagaagaacctgatcggagccctgctgttcgacagcggcgaaacagccgaggccacccggctgaagagaaccgccagaagaagatacaccagacggaagaaccggatctgctatctgcaagagatcttcagcaacgagatggccaaggtggacgacagcttcttccacagactggaagagtccttcctggtggaagaggataagaagcacgagcggcaccccatcttcggcaacatcgtggacgaggtggcctaccacgagaagtaccccaccatctaccacctgagaaagaaactggtggacagcaccgacaaggccgacctgcggctgatctatctggccctggcccacatgatcaagttccggggccacttcctgatcgagggcgacctgaaccccgacaacagcgacgtggacaagctgttcatccagctggtgcagacctacaaccagctgttcgaggaaaaccccatcaacgccagcggcgtggacgccaaggccatcctgtctgccagactgagcaagagcagacggctggaaaatctgatcgcccagctgcccggcgagaagaagaatggcctgttcggaaacctgattgccctgagcctgggcctgacccccaacttcaagagcaacttcgacctggccgaggatgccaaactgcagctgagcaaggacacctacgacgacgacctggacaacctgctggcccagatcggcgaccagtacgccgacctgtttctggccgccaagaacctgtccgacgccatcctgctgagcgacatcctgagagtgaacaccgagatcaccaaggcccccctgagcgcctctatgatcaagagatacgacgagcaccaccaggacctgaccctgctgaaagctctcgtgcggcagcagctgcctgagaagtacaaagagattttcttcgaccagagcaagaacggctacgccggctacattgacggcggagccagccaggaagagttctacaagttcatcaagcccatcctggaaaagatggacggcaccgaggaactgctcgtgaagctgaacagagaggacctgctgcggaagcagcggaccttcgacaacggcagcatcccccaccagatccacctgggagagctgcacgccattctgcggcggcaggaagatttttacccattcctgaaggacaaccgggaaaagatcgagaagatcctgaccttccgcatcccctactacgtgggccctctggccaggggaaacagcagattcgcctggatgaccagaaagagcgaggaaaccatcaccccctggaacttcgaggaagtggtggacaagggcgcttccgcccagagcttcatcgagcggatgaccaacttcgataagaacctgcccaacgagaaggtgctgcccaagcacagcctgctgtacgagtacttcaccgtgtataacgagctgaccaaagtgaaatacgtgaccgagggaatgagaaagcccgccttcctgagcggcgagcagaaaaaggccatcgtggacctgctgttcaagaccaaccggaaagtgaccgtgaagcagctgaaagaggactacttcaagaaaatcgagtgcttcgactccgtggaaatctccggcgtggaagatcggttcaacgcctccctgggcacataccacgatctgctgaaaattatcaaggacaaggacttcctggacaatgaggaaaacgaggacattctggaagatatcgtgctgaccctgacactgtttgaggacagagagatgatcgaggaacggctgaaaacctatgcccacctgttcgacgacaaagtgatgaagcagctgaagcggcggagatacaccggctggggcaggctgagccggaagctgatcaacggcatccgggacaagcagtccggcaagacaatcctggatttcctgaagtccgacggcttcgccaacagaaacttcatgcagctgatccacgacgacagcctgacctttaaagaggacatccagaaagcccaggtgtccggccagggcgatagcctgcacgagcacattgccaatctggccggcagccccgccattaagaagggcatcctgcagacagtgaaggtggtggacgagctcgtgaaagtgatgggccggcacaagcccgagaacatcgtgatcgaaatggccagagagaaccagaccacccagaagggacagaagaacagccgcgagagaatgaagcggatcgaagagggcatcaaagagctgggcagccagatcctgaaagaacaccccgtggaaaacacccagctgcagaacgagaagctgtacctgtactacctgcagaatgggcgggatatgtacgtggaccaggaactggacatcaaccggctgtccgactacgatgtggacgctatcgtgcctcagagctttctgaaggacgactccatcgacaacaaggtgctgaccagaagcgacaagaaccggggcaagagcgacaacgtgccctccgaagaggtcgtgaagaagatgaagaactactggcggcagctgctgaacgccaagctgattacccagagaaagttcgacaatctgaccaaggccgagagaggcggcctgagcgaactggataaggccggcttcatcaagagacagctggtggaaacccggcagatcacaaagcacgtggcacagatcctggactcccggatgaacactaagtacgacgagaatgacaagctgatccgggaagtgaaagtgatcaccctgaagtccaagctggtgtccgatttccggaaggatttccagttttacaaagtgcgcgagatcaacaactaccaccacgcccacgacgcctacctgaacgccgtcgtgggaaccgccctgatcaaaaagtaccctaagctggaaagcgagttcgtgtacggcgactacaaggtgtacgacgtgcggaagatgatcgccaagagcgagcaggaaatcggcaaggctaccgccaagtacttcttctacagcaacatcatgaactttttcaagaccgagattaccctggccaacggcgagatccggaagcggcctctgatcgagacaaacggcgaaaccggggagatcgtgtgggataagggccgggattttgccaccgtgcggaaagtgctgagcatgccccaagtgaatatcgtgaaaaagaccgaggtgcagacaggcggcttcagcaaagagtctatcctgcccaagaggaacagcgataagctgatcgccagaaagaaggactgggaccctaagaagtacggcggcttcgacagccccaccgtggcctattctgtgctggtggtggccaaagtggaaaagggcaagtccaagaaactgaagagtgtgaaagagctgctggggatcaccatcatggaaagaagcagcttcgagaagaatcccatcgactttctggaagccaagggctacaaagaagtgaaaaaggacctgatcatcaagctgcctaagtactccctgttcgagctggaaaacggccggaagagaatgctggcctctgccggcgaactgcagaagggaaacgaactggccctgccctccaaatatgtgaacttcctgtacctggccagccactatgagaagctgaagggctcccccgaggataatgagcagaaacagctgtttgtggaacagcacaagcactacctggacgagatcatcgagcagatcagcgagttctccaagagagtgatcctggccgacgctaatctggacaaagtgctgtccgcctacaacaagcaccgggataagcccatcagagagcaggccgagaatatcatccacctgtttaccctgaccaatctgggagcccctgccgccttcaagtactttgacaccaccatcgaccggaagaggtacaccagcaccaaagaggtgctggacgccaccctgatccaccagagcatcaccggcctgtacgagacacggatcgacctgtctcagctgggaggtgactccggcggcagcagcggcggcagcagcggcggatctagcggcggatctaccctgaacatcgaggacgagtacaggctgcacgagaccagcaaggagcccgacgtgagcctgggcagcacctggctgagcgatttccctcaggcttgggccgagaccggcggcatgggcctggccgtgcggcaggcccccctgattatccccctgaaggccaccagcacccccgtgagcatcaagcagtacccaatgtcccaggaggccaggctgggcatcaagcctcacatccagaggctgctggaccagggcatcctggtgccatgccagtccccctggaacacccctctgctgcccgtgaagaagcctggcaccaacgactaccggcccgtgcaggacctgagagaagtgaacaagcgggtggaggacatccacccaaccgtgcccaacccttacaacctgctgtccggcctgccccccagccaccagtggtacaccgtgctggacctgaaggacgccttcttctgcctgagactgcaccccacctctcagcccctgttcgccttcgagtggcgcgaccccgagatgggcatcagcggccagctgacctggaccagactgccacagggctttaagaatagcccaaccctgtttaacgaggccctgcacagggacctggccgacttcaggatccagcaccccgacctgattctgctgcagtacgtggacgacctgctgctggccgctaccagcgagctggactgccagcagggcaccagagccctgctgcagaccctgggcaacctgggctacagagccagcgccaagaaggcccagatctgtcagaagcaggtgaagtatctgggctacctgctgaaggaaggccagagatggctgaccgaggccagaaaggagactgtgatgggccagcccacccccaagacccccaggcagctgcgggagttcctgggcaaggccggcttttgcagactgtttatccctggcttcgccgagatggccgccccactgtaccctctgaccaagcctggcaccctgtttaactggggccccgaccagcagaaggcctaccaggagatcaagcaggccctgctgaccgcccccgccctgggcctgcccgacctgaccaagcctttcgagctgttcgtggacgagaagcagggatacgccaaaggcgtgctgacccagaagctgggcccctggcggaggcccgtggcctacctgagcaaaaaactggaccctgtggccgccggctggcccccatgcctgcggatggtggccgccatcgctgtgctgaccaaggacgccggcaagctgaccatgggccagcccctggtgatcctggcccctcacgccgtggaggctctggtgaagcagcctccagacaggtggctgtccaacgccaggatgacccactaccaggccctgctgctggacaccgaccgggtgcagttcggccctgtggtggccctgaaccccgccaccctgctgcctctgccagaggagggcctgcagcacaactgcctggacatcctggccgaggcccacggc

SEQ ID NO: 202 - RNA, 5661 nt, synthetic construct
  misc_feature 1..5661: note = Description of Artificial Sequence: Synthetic polynucleotide
  source 1..5661: mol_type = other RNA
gacaagaagtacagcatcggcctggacatcggcaccaactctgtgggctgggccgtgatcaccgacgagtacaaggtgcccagcaagaaattcaaggtgctgggcaacaccgaccggcacagcatcaagaagaacctgatcggagccctgctgttcgacagcggcgaaacagccgaggccacccggctgaagagaaccgccagaagaagatacaccagacggaagaaccggatctgctatctgcaagagatcttcagcaacgagatggccaaggtggacgacagcttcttccacagactggaagagtccttcctggtggaagaggataagaagcacgagcggcaccccatcttcggcaacatcgtggacgaggtggcctaccacgagaagtaccccaccatctaccacctgagaaagaaactggtggacagcaccgacaaggccgacctgcggctgatctatctggccctggcccacatgatcaagttccggggccacttcctgatcgagggcgacctgaaccccgacaacagcgacgtggacaagctgttcatccagctggtgcagacctacaaccagctgttcgaggaaaaccccatcaacgccagcggcgtggacgccaaggccatcctgtctgccagactgagcaagagcagacggctggaaaatctgatcgcccagctgcccggcgagaagaagaatggcctgttcggaaacctgattgccctgagcctgggcctgacccccaacttcaagagcaacttcgacctggccgaggatgccaaactgcagctgagcaaggacacctacgacgacgacctggacaacctgctggcccagatcggcgaccagtacgccgacctgtttctggccgccaagaacctgtccgacgccatcctgctgagcgacatcctgagagtgaacaccgagatcaccaaggcccccctgagcgcctctatgatcaagagatacgacgagcaccaccaggacctgaccctgctgaaagctctcgtgcggcagcagctgcctgagaagtacaaagagattttcttcgaccagagcaagaacggctacgccggctacattgacggcggagccagccaggaagagttctacaagttcatcaagcccatcctggaaaagatggacggcaccgaggaactgctcgtgaagctgaacagagaggacctgctgcggaagcagcggaccttcgacaacggcagcatcccccaccagatccacctgggagagctgcacgccattctgcggcggcaggaagatttttacccattcctgaaggacaaccgggaaaagatcgagaagatcctgaccttccgcatcccctactacgtgggccctctggccaggggaaacagcagattcgcctggatgaccagaaagagcgaggaaaccatcaccccctggaacttcgaggaagtggtggacaagggcgcttccgcccagagcttcatcgagcggatgaccaacttcgataagaacctgcccaacgagaaggtgctgcccaagcacagcctgctgtacgagtacttcaccgtgtataacgagctgaccaaagtgaaatacgtgaccgagggaatgagaaagcccgccttcctgagcggcgagcagaaaaaggccatcgtggacctgctgttcaagaccaaccggaaagtgaccgtgaagcagctgaaagaggactacttcaagaaaatcgagtgcttcgactccgtggaaatctccggcgtggaagatcggttcaacgcctccctgggcacataccacgatctgctgaaaattatcaaggacaaggacttcctggacaatgaggaaaacgaggacattctggaagatatcgtgctgaccctgacactgtttgaggacagagagatgatcgaggaacggctgaaaacctatgcccacctgttcgacgacaaagtgatgaagcagctgaagcggcggagatacaccggctggggcaggctgagccggaagctgatcaacggcatccgggacaagcagtccggcaagacaatcctggatttcctgaagtccgacggcttcgccaacagaaacttcatgcagctgatccacgacgacagcctgacctttaaagaggacatccagaaagcccaggtgtccggccagggcgatagcctgcacgagcacattgccaatctggccggcagccccgccattaagaagggcatcctgcagacagtgaaggtggtggacgagctcgtgaaagtgatgggccggcacaagcccgagaacatcgtgatcgaaatggccagagagaaccagaccacccagaagggacagaagaacagccgcgagagaatgaagcggatcgaagagggcatcaaagagctgggcagccagatcctgaaagaacaccccgtggaaaacacccagctgcagaacgagaagctgtacctgtactacctgcagaatgggcgggatatgtacgtggaccaggaactggacatcaaccggctgtccgactacgatgtggacgctatcgtgcctcagagctttctgaaggacgactccatcgacaacaaggtgctgaccagaagcgacaagaaccggggcaagagcgacaacgtgccctccgaagaggtcgtgaagaagatgaagaactactggcggcagctgctgaacgccaagctgattacccagagaaagttcgacaatctgaccaaggccgagagaggcggcctgagcgaactggataaggccggcttcatcaagagacagctggtggaaacccggcagatcacaaagcacgtggcacagatcctggactcccggatgaacactaagtacgacgagaatgacaagctgatccgggaagtgaaagtgatcaccctgaagtccaagctggtgtccgatttccggaaggatttccagttttacaaagtgcgcgagatcaacaactaccaccacgcccacgacgcctacctgaacgccgtcgtgggaaccgccctgatcaaaaagtaccctaagctggaaagcgagttcgtgtacggcgactacaaggtgtacgacgtgcggaagatgatcgccaagagcgagcaggaaatcggcaaggctaccgccaagtacttcttctacagcaacatcatgaactttttcaagaccgagattaccctggccaacggcgagatccggaagcggcctctgatcgagacaaacggcgaaaccggggagatcgtgtgggataagggccgggattttgccaccgtgcggaaagtgctgagcatgccccaagtgaatatcgtgaaaaagaccgaggtgcagacaggcggcttcagcaaagagtctatcctgcccaagaggaacagcgataagctgatcgccagaaagaaggactgggaccctaagaagtacggcggcttcgacagccccaccgtggcctattctgtgctggtggtggccaaagtggaaaagggcaagtccaagaaactgaagagtgtgaaagagctgctggggatcaccatcatggaaagaagcagcttcgagaagaatcccatcgactttctggaagccaagggctacaaagaagtgaaaaaggacctgatcatcaagctgcctaagtactccctgttcgagctggaaaacggccggaagagaatgctggcctctgccggcgaactgcagaagggaaacgaactggccctgccctccaaatatgtgaacttcctgtacctggccagccactatgagaagctgaagggctcccccgaggataatgagcagaaacagctgtttgtggaacagcacaagcactacctggacgagatcatcgagcagatcagcgagttctccaagagagtgatcctggccgacgctaatctggacaaagtgctgtccgcctacaacaagcaccgggataagcccatcagagagcaggccgagaatatcatccacctgtttaccctgaccaatctgggagcccctgccgccttcaagtactttgacaccaccatcgaccggaagaggtacaccagcaccaaagaggtgctggacgccaccctgatccaccagagcatcaccggcctgtacgagacacggatcgacctgtctcagctgggaggtgactccggcggcagcagcggcggcagcagcggcggatctagcggcggatctaccctgaacatcgaggacgagtacaggctgcacgagaccagcaaggagcccgacgtgagcctgggcagcacctggctgagcgatttccctcaggcttgggccgagaccggcggcatgggcctggccgtgcggcaggcccccctgattatccccctgaaggccaccagcacccccgtgagcatcaagcagtacccaatgtcccaggaggccaggctgggcatcaagcctcacatccagaggctgctggaccagggcatcctggtgccatgccagtccccctggaacacccctctgctgcccgtgaagaagcctggcaccaacgactaccggcccgtgcaggacctgagagaagtgaacaagcgggtggaggacatccacccaaccgtgcccaacccttacaacctgctgtccggcctgccccccagccaccagtggtacaccgtgctggacctgaaggacgccttcttctgcctgagactgcaccccacctctcagcccctgttcgccttcgagtggcgcgaccccgagatgggcatcagcggccagctgacctggaccagactgccacagggctttaagaatagcccaaccctgtttaacgaggccctgcacagggacctggccgacttcaggatccagcaccccgacctgattctgctgcagtacgtggacgacctgctgctggccgctaccagcgagctggactgccagcagggcaccagagccctgctgcagaccctgggcaacctgggctacagagccagcgccaagaaggcccagatctgtcagaagcaggtgaagtatctgggctacctgctgaaggaaggccagagatggctgaccgaggccagaaaggagactgtgatgggccagcccacccccaagacccccaggcagctgcgggagttcctgggcaaggccggcttttgcagactgtttatccctggcttcgccgagatggccgccccactgtaccctctgaccaagcctggcaccctgtttaactggggccccgaccagcagaaggcctaccaggagatcaagcaggccctgctgaccgcccccgccctgggcctgcccgacctgaccaagcctttcgagctgttcgtggacgagaagcagggatacgccaaaggcgtgctgacccagaagctgggcccctggcggaggcccgtggcctacctgagcaaaaaactggaccctgtggccgccggctggcccccatgcctgcggatggtggccgccatcgctgtgctgaccaaggacgccggcaagctgaccatgggccagcccctggtgatcctggcccctcacgccgtggaggctctggtgaagcagcctccagacaggtggctgtccaacgccaggatgacccactaccaggccctgctgctggacaccgaccgggtgcagttcggccctgtggtggccctgaaccccgccaccctgctgcctctgccagaggagggcctgcagcacaactgcctggacatcctggccgaggcccacggc

SEQ ID NO: 203 - protein, 2064 aa, synthetic construct
  REGION 1..2064: note = Description of Artificial Sequence: Synthetic polypeptide
DKKYSIGLDIGTNSVGWAVITDEYKVPSKKFKVLGNTDRHSIKKNLIGALLFDSGETAEATRLKRTARRRYTRRKNRICYLQEIFSNEMAKVDDSFFHRLEESFLVEEDKKHERHPIFGNIVDEVAYHEKYPTIYHLRKKLVDSTDKADLRLIYLALAHMIKFRGHFLIEGDLNPDNSDVDKLFIQLVQTYNQLFEENPINASGVDAKAILSARLSKSRRLENLIAQLPGEKKNGLFGNLIALSLGLTPNFKSNFDLAEDAKLQLSKDTYDDDLDNLLAQIGDQYADLFLAAKNLSDAILLSDILRVNTEITKAPLSASMIKRYDEHHQDLTLLKALVRQQLPEKYKEIFFDQSKNGYAGYIDGGASQEEFYKFIKPILEKMDGTEELLVKLNREDLLRKQRTFDNGSIPHQIHLGELHAILRRQEDFYPFLKDNREKIEKILTFRIPYYVGPLARGNSRFAWMTRKSEETITPWNFEEVVDKGASAQSFIERMTNFDKNLPNEKVLPKHSLLYEYFTVYNELTKVKYVTEGMRKPAFLSGEQKKAIVDLLFKTNRKVTVKQLKEDYFKKIECFDSVEISGVEDRFNASLGTYHDLLKIIKDKDFLDNEENEDILEDIVLTLTLFEDREMIEERLKTYAHLFDDKVMKQLKRRRYTGWGRLSRKLINGIRDKQSGKTILDFLKSDGFANRNFMQLIHDDSLTFKEDIQKAQVSGQGDSLHEHIANLAGSPAIKKGILQTVKVVDELVKVMGRHKPENIVIEMARENQTTQKGQKNSRERMKRIEEGIKELGSQILKEHPVENTQLQNEKLYLYYLQNGRDMYVDQELDINRLSDYDVDAIVPQSFLKDDSIDNKVLTRSDKNRGKSDNVPSEEVVKKMKNYWRQLLNAKLITQRKFDNLTKAERGGLSELDKAGFIKRQLVETRQITKHVAQILDSRMNTKYDENDKLIREVKVITLKSKLVSDFRKDFQFYKVREINNYHHAHDAYLNAVVGTALIKKYPKLESEFVYGDYKVYDVRKMIAKSEQEIGKATAKYFFYSNIMNFFKTEITLANGEIRKRPLIETNGETGEIVWDKGRDFATVRKVLSMPQVNIVKKTEVQTGGFSKESILPKRNSDKLIARKKDWDPKKYGGFDSPTVAYSVLVVAKVEKGKSKKLKSVKELLGITIMERSSFEKNPIDFLEAKGYKEVKKDLIIKLPKYSLFELENGRKRMLASAGELQKGNELALPSKYVNFLYLASHYEKLKGSPEDNEQKQLFVEQHKHYLDEIIEQISEFSKRVILADANLDKVLSAYNKHRDKPIREQAENIIHLFTLTNLGAPAAFKYFDTTIDRKRYTSTKEVLDATLIHQSITGLYETRIDLSQLGGDSGGSSGGSSGGSSGGSSGGSTLNIEDEYRLHETSKEPDVSLGSTWLSDFPQAWAETGGMGLAVRQAPLIIPLKATSTPVSIKQYPMSQEARLGIKPHIQRLLDQGILVPCQSPWNTPLLPVKKPGTNDYRPVQDLREVNKRVEDIHPTVPNPYNLLSGLPPSHQWYTVLDLKDAFFCLRLHPTSQPLFAFEWRDPEMGISGQLTWTRLPQGFKNSPTLFNEALHRDLADFRIQHPDLILLQYVDDLLLAATSELDCQQGTRALLQTLGNLGYRASAKKAQICQKQVKYLGYLLKEGQRWLTEARKETVMGQPTPKTPRQLREFLGKAGFCRLFIPGFAEMAAPLYPLTKPGTLFNWGPDQQKAYQEIKQALLTAPALGLPDLTKPFELFVDEKQGYAKGVLTQKLGPWRRPVAYLSKKLDPVAAGWPPCLRMVAAIAVLTKDAGKLTMGQPLVILAPHAVEALVKQPPDRWLSNARMTHYQALLLDTDRVQFGPVVALNPATLLPLPEEGLQHNCLDILAEAHGTRPDLTDQPLPDADHTWYTDGSSLLQEGQRKAGAAVTTETEVIWAKALPAGTSAQRAELIALTQALKMAEGKKLNVYTDSRYAFATAHIHGEIYRRRGWLTSEGKEIKNKDEILALLKALFLPKRLSIIHCPGHQKGHSAEARGNRMADQAARKAAITETPDTSTLLIENSSP

SEQ ID NO: 204 - DNA, 6192 bp, synthetic construct
  misc_feature 1..6192: note = Description of Artificial Sequence: Synthetic polynucleotide
  source 1..6192: mol_type = other DNA
gacaagaagtacagcatcggcctggacatcggcaccaactctgtgggctgggccgtgatcaccgacgagtacaaggtgcccagcaagaaattcaaggtgctgggcaacaccgaccggcacagcatcaagaagaacctgatcggagccctgctgttcgacagcggcgaaacagccgaggccacccggctgaagagaaccgccagaagaagatacaccagacggaagaaccggatctgctatctgcaagagatcttcagcaacgagatggccaaggtggacgacagcttcttccacagactggaagagtccttcctggtggaagaggataagaagcacgagcggcaccccatcttcggcaacatcgtggacgaggtggcctaccacgagaagtaccccaccatctaccacctgagaaagaaactggtggacagcaccgacaaggccgacctgcggctgatctatctggccctggcccacatgatcaagttccggggccacttcctgatcgagggcgacctgaaccccgacaacagcgacgtggacaagctgttcatccagctggtgcagacctacaaccagctgttcgaggaaaaccccatcaacgccagcggcgtggacgccaaggccatcctgtctgccagactgagcaagagcagacggctggaaaatctgatcgcccagctgcccggcgagaagaagaatggcctgttcggaaacctgattgccctgagcctgggcctgacccccaacttcaagagcaacttcgacctggccgaggatgccaaactgcagctgagcaaggacacctacgacgacgacctggacaacctgctggcccagatcggcgaccagtacgccgacctgtttctggccgccaagaacctgtccgacgccatcctgctgagcgacatcctgagagtgaacaccgagatcaccaaggcccccctgagcgcctctatgatcaagagatacgacgagcaccaccaggacctgaccctgctgaaagctctcgtgcggcagcagctgcctgagaagtacaaagagattttcttcgaccagagcaagaacggctacgccggctacattgacggcggagccagccaggaagagttctacaagttcatcaagcccatcctggaaaagatggacggcaccgaggaactgctcgtgaagctgaacagagaggacctgctgcggaagcagcggaccttcgacaacggcagcatcccccaccagatccacctgggagagctgcacgccattctgcggcggcaggaagatttttacccattcctgaaggacaaccgggaaaagatcgagaagatcctgaccttccgcatcccctactacgtgggccctctggccaggggaaacagcagattcgcctggatgaccagaaagagcgaggaaaccatcaccccctggaacttcgaggaagtggtggacaagggcgcttccgcccagagcttcatcgagcggatgaccaacttcgataagaacctgcccaacgagaaggtgctgcccaagcacagcctgctgtacgagtacttcaccgtgtataacgagctgaccaaagtgaaatacgtgaccgagggaatgagaaagcccgccttcctgagcggcgagcagaaaaaggccatcgtggacctgctgttcaagaccaaccggaaagtgaccgtgaagcagctgaaagaggactacttcaagaaaatcgagtgcttcgactccgtggaaatctccggcgtggaagatcggttcaacgcctccctgggcacataccacgatctgctgaaaattatcaaggacaaggacttcctggacaatgaggaaaacgaggacattctggaagatatcgtgctgaccctgacactgtttgaggacagagagatgatcgaggaacggctgaaaacctatgcccacctgttcgacgacaaagtgatgaagcagctgaagcggcggagatacaccggctggggcaggctgagccggaagctgatcaacggcatccgggacaagcagtccggcaagacaatcctggatttcctgaagtccgacggcttcgccaacagaaacttcatgcagctgatccacgacgacagcctgacctttaaagaggacatccagaaagcccaggtgtccggccagggcgatagcctgcacgagcacattgccaatctggccggcagccccgccattaagaagggcatcctgcagacagtgaaggtggtggacgagctcgtgaaagtgatgggccggcacaagcccgagaacatcgtgatcgaaatggccagagagaaccagaccacccagaagggacagaagaacagccgcgagagaatgaagcggatcgaagagggcatcaaagagctgggcagccagatcctgaaagaacaccccgtggaaaacacccagctgcagaacgagaagctgtacctgtactacctgcagaatgggcgggatatgtacgtggaccaggaactggacatcaaccggctgtccgactacgatgtggacgctatcgtgcctcagagctttctgaaggacgactccatcgacaacaaggtgctgaccagaagcgacaagaaccggggcaagagcgacaacgtgccctccgaagaggtcgtgaagaagatgaagaactactggcggcagctgctgaacgccaagctgattacccagagaaagttcgacaatctgaccaaggccgagagaggcggcctgagcgaactggataaggccggcttcatcaagagacagctggtggaaacccggcagatcacaaagcacgtggcacagatcctggactcccggatgaacactaagtacgacgagaatgacaagctgatccgggaagtgaaagtgatcaccctgaagtccaagctggtgtccgatttccggaaggatttccagttttacaaagtgcgcgagatcaacaactaccaccacgcccacgacgcctacctgaacgccgtcgtgggaaccgccctgatcaaaaagtaccctaagctggaaagcgagttcgtgtacggcgactacaaggtgtacgacgtgcggaagatgatcgccaagagcgagcaggaaatcggcaaggctaccgccaagtacttcttctacagcaacatcatgaactttttcaagaccgagattaccctggccaacggcgagatccggaagcggcctctgatcgagacaaacggcgaaaccggggagatcgtgtgggataagggccgggattttgccaccgtgcggaaagtgctgagcatgccccaagtgaatatcgtgaaaaagaccgaggtgcagacaggcggcttcagcaaagagtctatcctgcccaagaggaacagcgataagctgatcgccagaaagaaggactgggaccctaagaagtacggcggcttcgacagccccaccgtggcctattctgtgctggtggtggccaaagtggaaaagggcaagtccaagaaactgaagagtgtgaaagagctgctggggatcaccatcatggaaagaagcagcttcgagaagaatcccatcgactttctggaagccaagggctacaaagaagtgaaaaaggacctgatcatcaagctgcctaagtactccctgttcgagctggaaaacggccggaagagaatgctggcctctgccggcgaactgcagaagggaaacgaactggccctgccctccaaatatgtgaacttcctgtacctggccagccactatgagaagctgaagggctcccccgaggataatgagcagaaacagctgtttgtggaacagcacaagcactacctggacgagatcatcgagcagatcagcgagttctccaagagagtgatcctggccgacgctaatctggacaaagtgctgtccgcctacaacaagcaccgggataagcccatcagagagcaggccgagaatatcatccacctgtttaccctgaccaatctgggagcccctgccgccttcaagtactttgacaccaccatcgaccggaagaggtacaccagcaccaaagaggtgctggacgccaccctgatccaccagagcatcaccggcctgtacgagacacggatcgacctgtctcagctgggaggtgactccggcggcagcagcggcggctctagcggcggaagcagcggcggatctagcggcggctccaccctgaacatcgaggacgagtacaggctgcacgagaccagcaaggagcccgacgtgagcctgggcagcacctggctgagcgatttccctcaggcttgggccgagaccggcggcatgggcctggccgtgcggcaggcccccctgattatccccctgaaggccaccagcacccccgtgagcatcaagcagtacccaatgtcccaggaggccaggctgggcatcaagcctcacatccagaggctgctggaccagggcatcctggtgccatgccagtccccctggaacacccctctgctgcccgtgaagaagcctggcaccaacgactaccggcccgtgcaggacctgagagaagtgaacaagcgggtggaggacatccacccaaccgtgcccaacccttacaacctgctgtccggcctgccccccagccaccagtggtacaccgtgctggacctgaaggacgccttcttctgcctgagactgcaccccacctctcagcccctgttcgccttcgagtggcgcgaccccgagatgggcatcagcggccagctgacctggaccagactgccacagggctttaagaatagcccaaccctgtttaacgaggccctgcacagggacctggccgacttcaggatccagcaccccgacctgattctgctgcagtacgtggacgacctgctgctggccgctaccagcgagctggactgccagcagggcaccagagccctgctgcagaccctgggcaacctgggctacagagccagcgccaagaaggcccagatctgtcagaagcaggtgaagtatctgggctacctgctgaaggaaggccagagatggctgaccgaggccagaaaggagactgtgatgggccagcccacccccaagacccccaggcagctgcgggagttcctgggcaaggccggcttttgcagactgtttatccctggcttcgccgagatggccgccccactgtaccctctgaccaagcctggcaccctgtttaactggggccccgaccagcagaaggcctaccaggagatcaagcaggccctgctgaccgcccccgccctgggcctgcccgacctgaccaagcctttcgagctgttcgtggacgagaagcagggatacgccaaaggcgtgctgacccagaagctgggcccctggcggaggcccgtggcctacctgagcaaaaaactggaccctgtggccgccggctggcccccatgcctgcggatggtggccgccatcgctgtgctgaccaaggacgccggcaagctgaccatgggccagcccctggtgatcctggcccctcacgccgtggaggctctggtgaagcagcctccagacaggtggctgtccaacgccaggatgacccactaccaggccctgctgctggacaccgaccgggtgcagttcggccctgtggtggccctgaaccccgccaccctgctgcctctgccagaggagggcctgcagcacaactgcctggacatcctggccgaggcccacggcaccaggcccgacctgaccgaccagcccctgcctgacgccgaccacacctggtacaccgacggcagctccctgctgcaggagggccagaggaaggccggcgccgccgtgaccaccgagaccgaggtgatctgggccaaagccctgcctgccggcacctccgcccagcgggccgagctgatcgccctgacccaggccctgaagatggctgagggcaagaagctgaacgtgtacaccgattccagatacgccttcgccaccgcccacatccacggcgagatctacagaagaaggggctggctgacctccgagggcaaggagatcaagaacaaggacgagattctggccctgctgaaggccctgttcctgcctaagagactgagcatcatccactgtcccggccaccagaagggccacagcgccgaggccagaggcaatagaatggccgaccaggccgccagaaaggccgccatcaccgagacccccgacaccagcaccctgctgatcgagaacagcagcccc

SEQ ID NO: 205 - RNA, 6192 nt, synthetic construct
  misc_feature 1..6192: note = Description of Artificial Sequence: Synthetic polynucleotide
  source 1..6192: mol_type = other RNA
gacaagaagtacagcatcggcctggacatcggcaccaactctgtgggctgggccgtgatcaccgacgagtacaaggtgcccagcaagaaattcaaggtgctgggcaacaccgaccggcacagcatcaagaagaacctgatcggagccctgctgttcgacagcggcgaaacagccgaggccacccggctgaagagaaccgccagaagaagatacaccagacggaagaaccggatctgctatctgcaagagatcttcagcaacgagatggccaaggtggacgacagcttcttccacagactggaagagtccttcctggtggaagaggataagaagcacgagcggcaccccatcttcggcaacatcgtggacgaggtggcctaccacgagaagtaccccaccatctaccacctgagaaagaaactggtggacagcaccgacaaggccgacctgcggctgatctatctggccctggcccacatgatcaagttccggggccacttcctgatcgagggcgacctgaaccccgacaacagcgacgtggacaagctgttcatccagctggtgcagacctacaaccagctgttcgaggaaaaccccatcaacgccagcggcgtggacgccaaggccatcctgtctgccagactgagcaagagcagacggctggaaaatctgatcgcccagctgcccggcgagaagaagaatggcctgttcggaaacctgattgccctgagcctgggcctgacccccaacttcaagagcaacttcgacctggccgaggatgccaaactgcagctgagcaaggacacctacgacgacgacctggacaacctgctggcccagatcggcgaccagtacgccgacctgtttctggccgccaagaacctgtccgacgccatcctgctgagcgacatcctgagagtgaacaccgagatcaccaaggcccccctgagcgcctctatgatcaagagatacgacgagcaccaccaggacctgaccctgctgaaagctctcgtgcggcagcagctgcctgagaagtacaaagagattttcttcgaccagagcaagaacggctacgccggctacattgacggcggagccagccaggaagagttctacaagttcatcaagcccatcctggaaaagatggacggcaccgaggaactgctcgtgaagctgaacagagaggacctgctgcggaagcagcggaccttcgacaacggcagcatcccccaccagatccacctgggagagctgcacgccattctgcggcggcaggaagatttttacccattcctgaaggacaaccgggaaaagatcgagaagatcctgaccttccgcatcccctactacgtgggccctctggccaggggaaacagcagattcgcctggatgaccagaaagagcgaggaaaccatcaccccctggaacttcgaggaagtggtggacaagggcgcttccgcccagagcttcatcgagcggatgaccaacttcgataagaacctgcccaacgagaaggtgctgcccaagcacagcctgctgtacgagtacttcaccgtgtataacgagctgaccaaagtgaaatacgtgaccgagggaatgagaaagcccgccttcctgagcggcgagcagaaaaaggccatcgtggacctgctgttcaagaccaaccggaaagtgaccgtgaagcagctgaaagaggactacttcaagaaaatcgagtgcttcgactccgtggaaatctccggcgtggaagatcggttcaacgcctccctgggcacataccacgatctgctgaaaattatcaaggacaaggacttcctggacaatgaggaaaacgaggacattctggaagatatcgtgctgaccctgacactgtttgaggacagagagatgatcgaggaacggctgaaaacctatgcccacctgttcgacgacaaagtgatgaagcagctgaagcggcggagatacaccggctggggcaggctgagccggaagctgatcaacggcatccgggacaagcagtccggcaagacaatcctggatttcctgaagtccgacggcttcgccaacagaaacttcatgcagctgatccacgacgacagcctgacctttaaagaggacatccagaaagcccaggtgtccggccagggcgatagcctgcacgagcacattgccaatctggccggcagccccgccattaagaagggcatcctgcagacagtgaaggtggtggacgagctcgtgaaagtgatgggccggcacaagcccgagaacatcgtgatcgaaatggccagagagaaccagaccacccagaagggacagaagaacagccgcgagagaatgaagcggatcgaagagggcatcaaagagctgggcagccagatcctgaaagaacaccccgtggaaaacacccagctgcagaacgagaagctgtacctgtactacctgcagaatgggcgggatatgtacgtggaccaggaactggacatcaaccggctgtccgactacgatgtggacgctatcgtgcctcagagctttctgaaggacgactccatcgacaacaaggtgctgaccagaagcgacaagaaccggggcaagagcgacaacgtgccctccgaagaggtcgtgaagaagatgaagaactactggcggcagctgctgaacgccaagctgattacccagagaaagttcgacaatctgaccaaggccgagagaggcggcctgagcgaactggataaggccggcttcatcaagagacagctggtggaaacccggcagatcacaaagcacgtggcacagatcctggactcccggatgaacactaagtacgacgagaatgacaagctgatccgggaagtgaaagtgatcaccctgaagtccaagctggtgtccgatttccggaaggatttccagttttacaaagtgcgcgagatcaacaactaccaccacgcccacgacgcctacctgaacgccgtcgtgggaaccgccctgatcaaaaagtaccctaagctggaaagcgagttcgtgtacggcgactacaaggtgtacgacgtgcggaagatgatcgccaagagcgagcaggaaatcggcaaggctaccgccaagtacttcttctacagcaacatcatgaactttttcaagaccgagattaccctggccaacggcgagatccggaagcggcctctgatcgagacaaacggcgaaaccggggagatcgtgtgggataagggccgggattttgccaccgtgcggaaagtgctgagcatgccccaagtgaatatcgtgaaaaagaccgaggtgcagacaggcggcttcagcaaagagtctatcctgcccaagaggaacagcgataagctgatcgccagaaagaaggactgggaccctaagaagtacggcggcttcgacagccccaccgtggcctattctgtgctggtggtggccaaagtggaaaagggcaagtccaagaaactgaagagtgtgaaagagctgctggggatcaccatcatggaaagaagcagcttcgagaagaatcccatcgactttctggaagccaagggctacaaagaagtgaaaaaggacctgatcatcaagctgcctaagtactccctgttcgagctggaaaacggccggaagagaatgctggcctctgccggcgaactgcagaagggaaacgaactggccctgccctccaaatatgtgaacttcctgtacctggccagccactatgagaagctgaagggctcccccgaggataatgagcagaaacagctgtttgtggaacagcacaagcactacctggacgagatcatcgagcagatcagcgagttctccaagagagtgatcctggccgacgctaatctggacaaagtgctgtccgcctacaacaagcaccgggataagcccatcagagagcaggccgagaatatcatccacctgtttaccctgaccaatctgggagcccctgccgccttcaagtactttgacaccaccatcgaccggaagaggtacaccagcaccaaagaggtgctggacgccaccctgatccaccagagcatcaccggcctgtacgagacacggatcgacctgtctcagctgggaggtgactccggcggcagcagcggcggctctagcggcggaagcagcggcggatctagcggcggctccaccctgaacatcgaggacgagtacaggctgcacgagaccagcaaggagcccgacgtgagcctgggcagcacctggctgagcgatttccctcaggcttgggccgagaccggcggcatgggcctggccgtgcggcaggcccccctgattatccccctgaaggccaccagcacccccgtgagcatcaagcagtacccaatgtcccaggaggccaggctgggcatcaagcctcacatccagaggctgctggaccagggcatcctggtgccatgccagtccccctggaacacccctctgctgcccgtgaagaagcctggcaccaacgactaccggcccgtgcaggacctgagagaagtgaacaagcgggtggaggacatccacccaaccgtgcccaacccttacaacctgctgtccggcctgccccccagccaccagtggtacaccgtgctggacctgaaggacgccttcttctgcctgagactgcaccccacctctcagcccctgttcgccttcgagtggcgcgaccccgagatgggcatcagcggccagctgacctggaccagactgccacagggctttaagaatagcccaaccctgtttaacgaggccctgcacagggacctggccgacttcaggatccagcaccccgacctgattctgctgcagtacgtggacgacctgctgctggccgctaccagcgagctggactgccagcagggcaccagagccctgctgcagaccctgggcaacctgggctacagagccagcgccaagaaggcccagatctgtcagaagcaggtgaagtatctgggctacctgctgaaggaaggccagagatggctgaccgaggccagaaaggagactgtgatgggccagcccacccccaagacccccaggcagctgcgggagttcctgggcaaggccggcttttgcagactgtttatccctggcttcgccgagatggccgccccactgtaccctctgaccaagcctggcaccctgtttaactggggccccgaccagcagaaggcctaccaggagatcaagcaggccctgctgaccgcccccgccctgggcctgcccgacctgaccaagcctttcgagctgttcgtggacgagaagcagggatacgccaaaggcgtgctgacccagaagctgggcccctggcggaggcccgtggcctacctgagcaaaaaactggaccctgtggccgccggctggcccccatgcctgcggatggtggccgccatcgctgtgctgaccaaggacgccggcaagctgaccatgggccagcccctggtgatcctggcccctcacgccgtggaggctctggtgaagcagcctccagacaggtggctgtccaacgccaggatgacccactaccaggccctgctgctggacaccgaccgggtgcagttcggccctgtggtggccctgaaccccgccaccctgctgcctctgccagaggagggcctgcagcacaactgcctggacatcctggccgaggcccacggcaccaggcccgacctgaccgaccagcccctgcctgacgccgaccacacctggtacaccgacggcagctccctgctgcaggagggccagaggaaggccggcgccgccgtgaccaccgagaccgaggtgatctgggccaaagccctgcctgccggcacctccgcccagcgggccgagctgatcgccctgacccaggccctgaagatggctgagggcaagaagctgaacgtgtacaccgattccagatacgccttcgccaccgcccacatccacggcgagatctacagaagaaggggctggctgacctccgagggcaaggagatcaagaacaaggacgagattctggccctgctgaaggccctgttcctgcctaagagactgagcatcatccactgtcccggccaccagaagggccacagcgccgaggccagaggcaatagaatggccgaccaggccgccagaaaggccgccatcaccgagacccccgacaccagcaccctgctgatcgagaacagcagcccc

SEQ ID NO: 206 - protein, 1891 aa, synthetic construct
  REGION 1..1891: note = Description of Artificial Sequence: Synthetic polypeptide
DKKYSIGLDIGTNSVGWAVITDEYKVPSKKFKVLGNTDRHSIKKNLIGALLFDSGETAEATRLKRTARRRYTRRKNRICYLQEIFSNEMAKVDDSFFHRLEESFLVEEDKKHERHPIFGNIVDEVAYHEKYPTIYHLRKKLVDSTDKADLRLIYLALAHMIKFRGHFLIEGDLNPDNSDVDKLFIQLVQTYNQLFEENPINASGVDAKAILSARLSKSRRLENLIAQLPGEKKNGLFGNLIALSLGLTPNFKSNFDLAEDAKLQLSKDTYDDDLDNLLAQIGDQYADLFLAAKNLSDAILLSDILRVNTEITKAPLSASMIKRYDEHHQDLTLLKALVRQQLPEKYKEIFFDQSKNGYAGYIDGGASQEEFYKFIKPILEKMDGTEELLVKLNREDLLRKQRTFDNGSIPHQIHLGELHAILRRQEDFYPFLKDNREKIEKILTFRIPYYVGPLARGNSRFAWMTRKSEETITPWNFEEVVDKGASAQSFIERMTNFDKNLPNEKVLPKHSLLYEYFTVYNELTKVKYVTEGMRKPAFLSGEQKKAIVDLLFKTNRKVTVKQLKEDYFKKIECFDSVEISGVEDRFNASLGTYHDLLKIIKDKDFLDNEENEDILEDIVLTLTLFEDREMIEERLKTYAHLFDDKVMKQLKRRRYTGWGRLSRKLINGIRDKQSGKTILDFLKSDGFANRNFMQLIHDDSLTFKEDIQKAQVSGQGDSLHEHIANLAGSPAIKKGILQTVKVVDELVKVMGRHKPENIVIEMARENQTTQKGQKNSRERMKRIEEGIKELGSQILKEHPVENTQLQNEKLYLYYLQNGRDMYVDQELDINRLSDYDVDAIVPQSFLKDDSIDNKVLTRSDKNRGKSDNVPSEEVVKKMKNYWRQLLNAKLITQRKFDNLTKAERGGLSELDKAGFIKRQLVETRQITKHVAQILDSRMNTKYDENDKLIREVKVITLKSKLVSDFRKDFQFYKVREINNYHHAHDAYLNAVVGTALIKKYPKLESEFVYGDYKVYDVRKMIAKSEQEIGKATAKYFFYSNIMNFFKTEITLANGEIRKRPLIETNGETGEIVWDKGRDFATVRKVLSMPQVNIVKKTEVQTGGFSKESILPKRNSDKLIARKKDWDPKKYGGFDSPTVAYSVLVVAKVEKGKSKKLKSVKELLGITIMERSSFEKNPIDFLEAKGYKEVKKDLIIKLPKYSLFELENGRKRMLASAGELQKGNELALPSKYVNFLYLASHYEKLKGSPEDNEQKQLFVEQHKHYLDEIIEQISEFSKRVILADANLDKVLSAYNKHRDKPIREQAENIIHLFTLTNLGAPAAFKYFDTTIDRKRYTSTKEVLDATLIHQSITGLYETRIDLSQLGGDSGGSSGGSSGGSSGGSSGGSTLNIEDEYRLHETSKEPDVSLGSTWLSDFPQAWAETGGMGLAVRQAPLIIPLKATSTPVSIKQYPMSQEARLGIKPHIQRLLDQGILVPCQSPWNTPLLPVKKPGTNDYRPVQDLREVNKRVEDIHPTVPNPYNLLSGLPPSHQWYTVLDLKDAFFCLRLHPTSQPLFAFEWRDPEMGISGQLTWTRLPQGFKNSPTLFNEALHRDLADFRIQHPDLILLQYVDDLLLAATSELDCQQGTRALLQTLGNLGYRASAKKAQICQKQVKYLGYLLKEGQRWLTEARKETVMGQPTPKTPRQLREFLGKAGFCRLFIPGFAEMAAPLYPLTKPGTLFNWGPDQQKAYQEIKQALLTAPALGLPDLTKPFELFVDEKQGYAKGVLTQKLGPWRRPVAYLSKKLDPVAAGWPPCLRMVAAIAVLTKDAGKLTMGQPLVILAPHAVEALVKQPPDRWLSNARMTHYQALLLDTDRVQFGPVVALNPATLLPLPEEGLQHNCLDILAEAHG

SEQ ID NO: 207 - DNA, 5673 bp, synthetic construct
  misc_feature 1..5673: note = Description of Artificial Sequence: Synthetic polynucleotide
  source 1..5673: mol_type = other DNA
gacaagaagtacagcatcggcctggacatcggcaccaactctgtgggctgggccgtgatcaccgacgagtacaaggtgcccagcaagaaattcaaggtgctgggcaacaccgaccggcacagcatcaagaagaacctgatcggagccctgctgttcgacagcggcgaaacagccgaggccacccggctgaagagaaccgccagaagaagatacaccagacggaagaaccggatctgctatctgcaagagatcttcagcaacgagatggccaaggtggacgacagcttcttccacagactggaagagtccttcctggtggaagaggataagaagcacgagcggcaccccatcttcggcaacatcgtggacgaggtggcctaccacgagaagtaccccaccatctaccacctgagaaagaaactggtggacagcaccgacaaggccgacctgcggctgatctatctggccctggcccacatgatcaagttccggggccacttcctgatcgagggcgacctgaaccccgacaacagcgacgtggacaagctgttcatccagctggtgcagacctacaaccagctgttcgaggaaaaccccatcaacgccagcggcgtggacgccaaggccatcctgtctgccagactgagcaagagcagacggctggaaaatctgatcgcccagctgcccggcgagaagaagaatggcctgttcggaaacctgattgccctgagcctgggcctgacccccaacttcaagagcaacttcgacctggccgaggatgccaaactgcagctgagcaaggacacctacgacgacgacctggacaacctgctggcccagatcggcgaccagtacgccgacctgtttctggccgccaagaacctgtccgacgccatcctgctgagcgacatcctgagagtgaacaccgagatcaccaaggcccccctgagcgcctctatgatcaagagatacgacgagcaccaccaggacctgaccctgctgaaagctctcgtgcggcagcagctgcctgagaagtacaaagagattttcttcgaccagagcaagaacggctacgccggctacattgacggcggagccagccaggaagagttctacaagttcatcaagcccatcctggaaaagatggacggcaccgaggaactgctcgtgaagctgaacagagaggacctgctgcggaagcagcggaccttcgacaacggcagcatcccccaccagatccacctgggagagctgcacgccattctgcggcggcaggaagatttttacccattcctgaaggacaaccgggaaaagatcgagaagatcctgaccttccgcatcccctactacgtgggccctctggccaggggaaacagcagattcgcctggatgaccagaaagagcgaggaaaccatcaccccctggaacttcgaggaagtggtggacaagggcgcttccgcccagagcttcatcgagcggatgaccaacttcgataagaacctgcccaacgagaaggtgctgcccaagcacagcctgctgtacgagtacttcaccgtgtataacgagctgaccaaagtgaaatacgtgaccgagggaatgagaaagcccgccttcctgagcggcgagcagaaaaaggccatcgtggacctgctgttcaagaccaaccggaaagtgaccgtgaagcagctgaaagaggactacttcaagaaaatcgagtgcttcgactccgtggaaatctccggcgtggaagatcggttcaacgcctccctgggcacataccacgatctgctgaaaattatcaaggacaaggacttcctggacaatgaggaaaacgaggacattctggaagatatcgtgctgaccctgacactgtttgaggacagagagatgatcgaggaacggctgaaaacctatgcccacctgttcgacgacaaagtgatgaagcagctgaagcggcggagatacaccggctggggcaggctgagccggaagctgatcaacggcatccgggacaagcagtccggcaagacaatcctggatttcctgaagtccgacggcttcgccaacagaaacttcatgcagctgatccacgacgacagcctgacctttaaagaggacatccagaaagcccaggtgtccggccagggcgatagcctgcacgagcacattgccaatctggccggcagccccgccattaagaagggcatcctgcagacagtgaaggtggtggacgagctcgtgaaagtgatgggccggcacaagcccgagaacatcgtgatcgaaatggccagagagaaccagaccacccagaagggacagaagaacagccgcgagagaatgaagcggatcgaagagggcatcaaagagctgggcagccagatcctgaaagaacaccccgtggaaaacacccagctgcagaacgagaagctgtacctgtactacctgcagaatgggcgggatatgtacgtggaccaggaactggacatcaaccggctgtccgactacgatgtggacgctatcgtgcctcagagctttctgaaggacgactccatcgacaacaaggtgctgaccagaagcgacaagaaccggggcaagagcgacaacgtgccctccgaagaggtcgtgaagaagatgaagaactactggcggcagctgctgaacgccaagctgattacccagagaaagttcgacaatctgaccaaggccgagagaggcggcctgagcgaactggataaggccggcttcatcaagagacagctggtggaaacccggcagatcacaaagcacgtggcacagatcctggactcccggatgaacactaagtacgacgagaatgacaagctgatccgggaagtgaaagtgatcaccctgaagtccaagctggtgtccgatttccggaaggatttccagttttacaaagtgcgcgagatcaacaactaccaccacgcccacgacgcctacctgaacgccgtcgtgggaaccgccctgatcaaaaagtaccctaagctggaaagcgagttcgtgtacggcgactacaaggtgtacgacgtgcggaagatgatcgccaagagcgagcaggaaatcggcaaggctaccgccaagtacttcttctacagcaacatcatgaactttttcaagaccgagattaccctggccaacggcgagatccggaagcggcctctgatcgagacaaacggcgaaaccggggagatcgtgtgggataagggccgggattttgccaccgtgcggaaagtgctgagcatgccccaagtgaatatcgtgaaaaagaccgaggtgcagacaggcggcttcagcaaagagtctatcctgcccaagaggaacagcgataagctgatcgccagaaagaaggactgggaccctaagaagtacggcggcttcgacagccccaccgtggcctattctgtgctggtggtggccaaagtggaaaagggcaagtccaagaaactgaagagtgtgaaagagctgctggggatcaccatcatggaaagaagcagcttcgagaagaatcccatcgactttctggaagccaagggctacaaagaagtgaaaaaggacctgatcatcaagctgcctaagtactccctgttcgagctggaaaacggccggaagagaatgctggcctctgccggcgaactgcagaagggaaacgaactggccctgccctccaaatatgtgaacttcctgtacctggccagccactatgagaagctgaagggctcccccgaggataatgagcagaaacagctgtttgtggaacagcacaagcactacctggacgagatcatcgagcagatcagcgagttctccaagagagtgatcctggccgacgctaatctggacaaagtgctgtccgcctacaacaagcaccgggataagcccatcagagagcaggccgagaatatcatccacctgtttaccctgaccaatctgggagcccctgccgccttcaagtactttgacaccaccatcgaccggaagaggtacaccagcaccaaagaggtgctggacgccaccctgatccaccagagcatcaccggcctgtacgagacacggatcgacctgtctcagctgggaggtgactccggcggcagcagcggcggctctagcggcggaagcagcggcggatctagcggcggctccaccctgaacatcgaggacgagtacaggctgcacgagaccagcaaggagcccgacgtgagcctgggcagcacctggctgagcgatttccctcaggcttgggccgagaccggcggcatgggcctggccgtgcggcaggcccccctgattatccccctgaaggccaccagcacccccgtgagcatcaagcagtacccaatgtcccaggaggccaggctgggcatcaagcctcacatccagaggctgctggaccagggcatcctggtgccatgccagtccccctggaacacccctctgctgcccgtgaagaagcctggcaccaacgactaccggcccgtgcaggacctgagagaagtgaacaagcgggtggaggacatccacccaaccgtgcccaacccttacaacctgctgtccggcctgccccccagccaccagtggtacaccgtgctggacctgaaggacgccttcttctgcctgagactgcaccccacctctcagcccctgttcgccttcgagtggcgcgaccccgagatgggcatcagcggccagctgacctggaccagactgccacagggctttaagaatagcccaaccctgtttaacgaggccctgcacagggacctggccgacttcaggatccagcaccccgacctgattctgctgcagtacgtggacgacctgctgctggccgctaccagcgagctggactgccagcagggcaccagagccctgctgcagaccctgggcaacctgggctacagagccagcgccaagaaggcccagatctgtcagaagcaggtgaagtatctgggctacctgctgaaggaaggccagagatggctgaccgaggccagaaaggagactgtgatgggccagcccacccccaagacccccaggcagctgcgggagttcctgggcaaggccggcttttgcagactgtttatccctggcttcgccgagatggccgccccactgtaccctctgaccaagcctggcaccctgtttaactggggccccgaccagcagaaggcctaccaggagatcaagcaggccctgctgaccgcccccgccctgggcctgcccgacctgaccaagcctttcgagctgttcgtggacgagaagcagggatacgccaaaggcgtgctgacccagaagctgggcccctggcggaggcccgtggcctacctgagcaaaaaactggaccctgtggccgccggctggcccccatgcctgcggatggtggccgccatcgctgtgctgaccaaggacgccggcaagctgaccatgggccagcccctggtgatcctggcccctcacgccgtggaggctctggtgaagcagcctccagacaggtggctgtccaacgccaggatgacccactaccaggccctgctgctggacaccgaccgggtgcagttcggccctgtggtggccctgaaccccgccaccctgctgcctctgccagaggagggcctgcagcacaactgcctggacatcctggccgaggcccacggc

SEQ ID NO: 208 - RNA, 5673 nt, synthetic construct
  misc_feature 1..5673: note = Description of Artificial Sequence: Synthetic polynucleotide
  source 1..5673: mol_type = other RNA
gacaagaagtacagcatcggcctggacatcggcaccaactctgtgggctgggccgtgatcaccgacgagtacaaggtgcccagcaagaaattcaaggtgctgggcaacaccgaccggcacagcatcaagaagaacctgatcggagccctgctgttcgacagcggcgaaacagccgaggccacccggctgaagagaaccgccagaagaagatacaccagacggaagaaccggatctgctatctgcaagagatcttcagcaacgagatggccaaggtggacgacagcttcttccacagactggaagagtccttcctggtggaagaggataagaagcacgagcggcaccccatcttcggcaacatcgtggacgaggtggcctaccacgagaagtaccccaccatctaccacctgagaaagaaactggtggacagcaccgacaaggccgacctgcggctgatctatctggccctggcccacatgatcaagttccggggccacttcctgatcgagggcgacctgaaccccgacaacagcgacgtggacaagctgttcatccagctggtgcagacctacaaccagctgttcgaggaaaaccccatcaacgccagcggcgtggacgccaaggccatcctgtctgccagactgagcaagagcagacggctggaaaatctgatcgcccagctgcccggcgagaagaagaatggcctgttcggaaacctgattgccctgagcctgggcctgacccccaacttcaagagcaacttcgacctggccgaggatgccaaactgcagctgagcaaggacacctacgacgacgacctggacaacctgctggcccagatcggcgaccagtacgccgacctgtttctggccgccaagaacctgtccgacgccatcctgctgagcgacatcctgagagtgaacaccgagatcaccaaggcccccctgagcgcctctatgatcaagagatacgacgagcaccaccaggacctgaccctgctgaaagctctcgtgcggcagcagctgcctgagaagtacaaagagattttcttcgaccagagcaagaacggctacgccggctacattgacggcggagccagccaggaagagttctacaagttcatcaagcccatcctggaaaagatggacggcaccgaggaactgctcgtgaagctgaacagagaggacctgctgcggaagcagcggaccttcgacaacggcagcatcccccaccagatccacctgggagagctgcacgccattctgcggcggcaggaagatttttacccattcctgaaggacaaccgggaaaagatcgagaagatcctgaccttccgcatcccctactacgtgggccctctggccaggggaaacagcagattcgcctggatgaccagaaagagcgaggaaaccatcaccccctggaacttcgaggaagtggtggacaagggcgcttccgcccagagcttcatcgagcggatgaccaacttcgataagaacctgcccaacgagaaggtgctgcccaagcacagcctgctgtacgagtacttcaccgtgtataacgagctgaccaaagtgaaatacgtgaccgagggaatgagaaagcccgccttcctgagcggcgagcagaaaaaggccatcgtggacctgctgttcaagaccaaccggaaagtgaccgtgaagcagctgaaagaggactacttcaagaaaatcgagtgcttcgactccgtggaaatctccggcgtggaagatcggttcaacgcctccctgggcacataccacgatctgctgaaaattatcaaggacaaggacttcctggacaatgaggaaaacgaggacattctggaagatatcgtgctgaccctgacactgtttgaggacagagagatgatcgaggaacggctgaaaacctatgcccacctgttcgacgacaaagtgatgaagcagctgaagcggcggagatacaccggctggggcaggctgagccggaagctgatcaacggcatccgggacaagcagtccggcaagacaatcctggatttcctgaagtccgacggcttcgccaacagaaacttcatgcagctgatccacgacgacagcctgacctttaaagaggacatccagaaagcccaggtgtccggccagggcgatagcctgcacgagcacattgccaatctggccggcagccccgccattaagaagggcatcctgcagacagtgaaggtggtggacgagctcgtgaaagtgatgggccggcacaagcccgagaacatcgtgatcgaaatggccagagagaaccagaccacccagaagggacagaagaacagccgcgagagaatgaagcggatcgaagagggcatcaaagagctgggcagccagatcctgaaagaacaccccgtggaaaacacccagctgcagaacgagaagctgtacctgtactacctgcagaatgggcgggatatgtacgtggaccaggaactggacatcaaccggctgtccgactacgatgtggacgctatcgtgcctcagagctttctgaaggacgactccatcgacaacaaggtgctgaccagaagcgacaagaaccggggcaagagcgacaacgtgccctccgaagaggtcgtgaagaagatgaagaactactggcggcagctgctgaacgccaagctgattacccagagaaagttcgacaatctgaccaaggccgagagaggcggcctgagcgaactggataaggccggcttcatcaagagacagctggtggaaacccggcagatcacaaagcacgtggcacagatcctggactcccggatgaacactaagtacgacgagaatgacaagctgatccgggaagtgaaagtgatcaccctgaagtccaagctggtgtccgatttccggaaggatttccagttttacaaagtgcgcgagatcaacaactaccaccacgcccacgacgcctacctgaacgccgtcgtgggaaccgccctgatcaaaaagtaccctaagctggaaagcgagttcgtgtacggcgactacaaggtgtacgacgtgcggaagatgatcgccaagagcgagcaggaaatcggcaaggctaccgccaagtacttcttctacagcaacatcatgaactttttcaagaccgagattaccctggccaacggcgagatccggaagcggcctctgatcgagacaaacggcgaaaccggggagatcgtgtgggataagggccgggattttgccaccgtgcggaaagtgctgagcatgccccaagtgaatatcgtgaaaaagaccgaggtgcagacaggcggcttcagcaaagagtctatcctgcccaagaggaacagcgataagctgatcgccagaaagaaggactgggaccctaagaagtacggcggcttcgacagccccaccgtggcctattctgtgctggtggtggccaaagtggaaaagggcaagtccaagaaactgaagagtgtgaaagagctgctggggatcaccatcatggaaagaagcagcttcgagaagaatcccatcgactttctggaagccaagggctacaaagaagtgaaaaaggacctgatcatcaagctgcctaagtactccctgttcgagctggaaaacggccggaagagaatgctggcctctgccggcgaactgcagaagggaaacgaactggccctgccctccaaatatgtgaacttcctgtacctggccagccactatgagaagctgaagggctcccccgaggataatgagcagaaacagctgtttgtggaacagcacaagcactacctggacgagatcatcgagcagatcagcgagttctccaagagagtgatcctggccgacgctaatctggacaaagtgctgtccgcctacaacaagcaccgggataagcccatcagagagcaggccgagaatatcatccacctgtttaccctgaccaatctgggagcccctgccgccttcaagtactttgacaccaccatcgaccggaagaggtacaccagcaccaaagaggtgctggacgccaccctgatccaccagagcatcaccggcctgtacgagacacggatcgacctgtctcagctgggaggtgactccggcggcagcagcggcggctctagcggcggaagcagcggcggatctagcggcggctccaccctgaacatcgaggacgagtacaggctgcacgagaccagcaaggagcccgacgtgagcctgggcagcacctggctgagcgatttccctcaggcttgggccgagaccggcggcatgggcctggccgtgcggcaggcccccctgattatccccctgaaggccaccagcacccccgtgagcatcaagcagtacccaatgtcccaggaggccaggctgggcatcaagcctcacatccagaggctgctggaccagggcatcctggtgccatgccagtccccctggaacacccctctgctgcccgtgaagaagcctggcaccaacgactaccggcccgtgcaggacctgagagaagtgaacaagcgggtggaggacatccacccaaccgtgcccaacccttacaacctgctgtccggcctgccccccagccaccagtggtacaccgtgctggacctgaaggacgccttcttctgcctgagactgcaccccacctctcagcccctgttcgccttcgagtggcgcgaccccgagatgggcatcagcggccagctgacctggaccagactgccacagggctttaagaatagcccaaccctgtttaacgaggccctgcacagggacctggccgacttcaggatccagcaccccgacctgattctgctgcagtacgtggacgacctgctgctggccgctaccagcgagctggactgccagcagggcaccagagccctgctgcagaccctgggcaacctgggctacagagccagcgccaagaaggcccagatctgtcagaagcaggtgaagtatctgggctacctgctgaaggaaggccagagatggctgaccgaggccagaaaggagactgtgatgggccagcccacccccaagacccccaggcagctgcgggagttcctgggcaaggccggcttttgcagactgtttatccctggcttcgccgagatggccgccccactgtaccctctgaccaagcctggcaccctgtttaactggggccccgaccagcagaaggcctaccaggagatcaagcaggccctgctgaccgcccccgccctgggcctgcccgacctgaccaagcctttcgagctgttcgtggacgagaagcagggatacgccaaaggcgtgctgacccagaagctgggcccctggcggaggcccgtggcctacctgagcaaaaaactggaccctgtggccgccggctggcccccatgcctgcggatggtggccgccatcgctgtgctgaccaaggacgccggcaagctgaccatgggccagcccctggtgatcctggcccctcacgccgtggaggctctggtgaagcagcctccagacaggtggctgtccaacgccaggatgacccactaccaggccctgctgctggacaccgaccgggtgcagttcggccctgtggtggccctgaaccccgccaccctgctgcctctgccagaggagggcctgcagcacaactgcctggacatcctggccgaggcccacggc

SEQ ID NO: 209 - protein, 2068 aa, synthetic construct
  REGION 1..2068: note = Description of Artificial Sequence: Synthetic polypeptide
DKKYSIGLDIGTNSVGWAVITDEYKVPSKKFKVLGNTDRHSIKKNLIGALLFDSGETAEATRLKRTARRRYTRRKNRICYLQEIFSNEMAKVDDSFFHRLEESFLVEEDKKHERHPIFGNIVDEVAYHEKYPTIYHLRKKLVDSTDKADLRLIYLALAHMIKFRGHFLIEGDLNPDNSDVDKLFIQLVQTYNQLFEENPINASGVDAKAILSARLSKSRRLENLIAQLPGEKKNGLFGNLIALSLGLTPNFKSNFDLAEDAKLQLSKDTYDDDLDNLLAQIGDQYADLFLAAKNLSDAILLSDILRVNTEITKAPLSASMIKRYDEHHQDLTLLKALVRQQLPEKYKEIFFDQSKNGYAGYIDGGASQEEFYKFIKPILEKMDGTEELLVKLNREDLLRKQRTFDNGSIPHQIHLGELHAILRRQEDFYPFLKDNREKIEKILTFRIPYYVGPLARGNSRFAWMTRKSEETITPWNFEEVVDKGASAQSFIERMTNFDKNLPNEKVLPKHSLLYEYFTVYNELTKVKYVTEGMRKPAFLSGEQKKAIVDLLFKTNRKVTVKQLKEDYFKKIECFDSVEISGVEDRFNASLGTYHDLLKIIKDKDFLDNEENEDILEDIVLTLTLFEDREMIEERLKTYAHLFDDKVMKQLKRRRYTGWGRLSRKLINGIRDKQSGKTILDFLKSDGFANRNFMQLIHDDSLTFKEDIQKAQVSGQGDSLHEHIANLAGSPAIKKGILQTVKVVDELVKVMGRHKPENIVIEMARENQTTQKGQKNSRERMKRIEEGIKELGSQILKEHPVENTQLQNEKLYLYYLQNGRDMYVDQELDINRLSDYDVDAIVPQSFLKDDSIDNKVLTRSDKNRGKSDNVPSEEVVKKMKNYWRQLLNAKLITQRKFDNLTKAERGGLSELDKAGFIKRQLVETRQITKHVAQILDSRMNTKYDENDKLIREVKVITLKSKLVSDFRKDFQFYKVREINNYHHAHDAYLNAVVGTALIKKYPKLESEFVYGDYKVYDVRKMIAKSEQEIGKATAKYFFYSNIMNFFKTEITLANGEIRKRPLIETNGETGEIVWDKGRDFATVRKVLSMPQVNIVKKTEVQTGGFSKESILPKRNSDKLIARKKDWDPKKYGGFDSPTVAYSVLVVAKVEKGKSKKLKSVKELLGITIMERSSFEKNPIDFLEAKGYKEVKKDLIIKLPKYSLFELENGRKRMLASAGELQKGNELALPSKYVNFLYLASHYEKLKGSPEDNEQKQLFVEQHKHYLDEIIEQISEFSKRVILADANLDKVLSAYNKHRDKPIREQAENIIHLFTLTNLGAPAAFKYFDTTIDRKRYTSTKEVLDATLIHQSITGLYETRIDLSQLGGDSGGSSGGSSGGSSGGSSGGSSGGSTLNIEDEYRLHETSKEPDVSLGSTWLSDFPQAWAETGGMGLAVRQAPLIIPLKATSTPVSIKQYPMSQEARLGIKPHIQRLLDQGILVPCQSPWNTPLLPVKKPGTNDYRPVQDLREVNKRVEDIHPTVPNPYNLLSGLPPSHQWYTVLDLKDAFFCLRLHPTSQPLFAFEWRDPEMGISGQLTWTRLPQGFKNSPTLFNEALHRDLADFRIQHPDLILLQYVDDLLLAATSELDCQQGTRALLQTLGNLGYRASAKKAQICQKQVKYLGYLLKEGQRWLTEARKETVMGQPTPKTPRQLREFLGKAGFCRLFIPGFAEMAAPLYPLTKPGTLFNWGPDQQKAYQEIKQALLTAPALGLPDLTKPFELFVDEKQGYAKGVLTQKLGPWRRPVAYLSKKLDPVAAGWPPCLRMVAAIAVLTKDAGKLTMGQPLVILAPHAVEALVKQPPDRWLSNARMTHYQALLLDTDRVQFGPVVALNPATLLPLPEEGLQHNCLDILAEAHGTRPDLTDQPLPDADHTWYTDGSSLLQEGQRKAGAAVTTETEVIWAKALPAGTSAQRAELIALTQALKMAEGKKLNVYTDSRYAFATAHIHGEIYRRRGWLTSEGKEIKNKDEILALLKALFLPKRLSIIHCPGHQKGHSAEARGNRMADQAARKAAITETPDTSTLLIENSSP

SEQ ID NO: 210 - DNA, 6204 bp, synthetic construct
  misc_feature 1..6204: note = Description of Artificial Sequence: Synthetic polynucleotide
  source 1..6204: mol_type = other DNA
gacaagaagtacagcatcggcctggacatcggcaccaactctgtgggctgggccgtgatcaccgacgagtacaaggtgcccagcaagaaattcaaggtgctgggcaacaccgaccggcacagcatcaagaagaacctgatcggagccctgctgttcgacagcggcgaaacagccgaggccacccggctgaagagaaccgccagaagaagatacaccagacggaagaaccggatctgctatctgcaagagatcttcagcaacgagatggccaaggtggacgacagcttcttccacagactggaagagtccttcctggtggaagaggataagaagcacgagcggcaccccatcttcggcaacatcgtggacgaggtggcctaccacgagaagtaccccaccatctaccacctgagaaagaaactggtggacagcaccgacaaggccgacctgcggctgatctatctggccctggcccacatgatcaagttccggggccacttcctgatcgagggcgacctgaaccccgacaacagcgacgtggacaagctgttcatccagctggtgcagacctacaaccagctgttcgaggaaaaccccatcaacgccagcggcgtggacgccaaggccatcctgtctgccagactgagcaagagcagacggctggaaaatctgatcgcccagctgcccggcgagaagaagaatggcctgttcggaaacctgattgccctgagcctgggcctgacccccaacttcaagagcaacttcgacctggccgaggatgccaaactgcagctgagcaaggacacctacgacgacgacctggacaacctgctggcccagatcggcgaccagtacgccgacctgtttctggccgccaagaacctgtccgacgccatcctgctgagcgacatcctgagagtgaacaccgagatcaccaaggcccccctgagcgcctctatgatcaagagatacgacgagcaccaccaggacctgaccctgctgaaagctctcgtgcggcagcagctgcctgagaagtacaaagagattttcttcgaccagagcaagaacggctacgccggctacattgacggcggagccagccaggaagagttctacaagttcatcaagcccatcctggaaaagatggacggcaccgaggaactgctcgtgaagctgaacagagaggacctgctgcggaagcagcggaccttcgacaacggcagcatcccccaccagatccacctgggagagctgcacgccattctgcggcggcaggaagatttttacccattcctgaaggacaaccgggaaaagatcgagaagatcctgaccttccgcatcccctactacgtgggccctctggccaggggaaacagcagattcgcctggatgaccagaaagagcgaggaaaccatcaccccctggaacttcgaggaagtggtggacaagggcgcttccgcccagagcttcatcgagcggatgaccaacttcgataagaacctgcccaacgagaaggtgctgcccaagcacagcctgctgtacgagtacttcaccgtgtataacgagctgaccaaagtgaaatacgtgaccgagggaatgagaaagcccgccttcctgagcggcgagcagaaaaaggccatcgtggacctgctgttcaagaccaaccggaaagtgaccgtgaagcagctgaaagaggactacttcaagaaaatcgagtgcttcgactccgtggaaatctccggcgtggaagatcggttcaacgcctccctgggcacataccacgatctgctgaaaattatcaaggacaaggacttcctggacaatgaggaaaacgaggacattctggaagatatcgtgctgaccctgacactgtttgaggacagagagatgatcgaggaacggctgaaaacctatgcccacctgttcgacgacaaagtgatgaagcagctgaagcggcggagatacaccggctggggcaggctgagccggaagctgatcaacggcatccgggacaagcagtccggcaagacaatcctggatttcctgaagtccgacggcttcgccaacagaaacttcatgcagctgatccacgacgacagcctgacctttaaagaggacatccagaaagcccaggtgtccggccagggcgatagcctgcacgagcacattgccaatctggccggcagccccgccattaagaagggcatcctgcagacagtgaaggtggtggacgagctcgtgaaagtgatgggccggcacaagcccgagaacatcgtgatcgaaatggccagagagaaccagaccacccagaagggacagaagaacagccgcgagagaatgaagcggatcgaagagggcatcaaagagctgggcagccagatcctgaaagaacaccccgtggaaaacacccagctgcagaacgagaagctgtacctgtactacctgcagaatgggcgggatatgtacgtggaccaggaactggacatcaaccggctgtccgactacgatgtggacgctatcgtgcctcagagctttctgaaggacgactccatcgacaacaaggtgctgaccagaagcgacaagaaccggggcaagagcgacaacgtgccctccgaagaggtcgtgaagaagatgaagaactactggcggcagctgctgaacgccaagctgattacccagagaaagttcgacaatctgaccaaggccgagagaggcggcctgagcgaactggataaggccggcttcatcaagagacagctggtggaaacccggcagatcacaaagcacgtggcacagatcctggactcccggatgaacactaagtacgacgagaatgacaagctgatccgggaagtgaaagtgatcaccctgaagtccaagctggtgtccgatttccggaaggatttccagttttacaaagtgcgcgagatcaacaactaccaccacgcccacgacgcctacctgaacgccgtcgtgggaaccgccctgatcaaaaagtaccctaagctggaaagcgagttcgtgtacggcgactacaaggtgtacgacgtgcggaagatgatcgccaagagcgagcaggaaatcggcaaggctaccgccaagtacttcttctacagcaacatcatgaactttttcaagaccgagattaccctggccaacggcgagatccggaagcggcctctgatcgagacaaacggcgaaaccggggagatcgtgtgggataagggccgggattttgccaccgtgcggaaagtgctgagcatgccccaagtgaatatcgtgaaaaagaccgaggtgcagacaggcggcttcagcaaagagtctatcctgcccaagaggaacagcgataagctgatcgccagaaagaaggactgggaccctaagaagtacggcggcttcgacagccccaccgtggcctattctgtgctggtggtggccaaagtggaaaagggcaagtccaagaaactgaagagtgtgaaagagctgctggggatcaccatcatggaaagaagcagcttcgagaagaatcccatcgactttctggaagccaagggctacaaagaagtgaaaaaggacctgatcatcaagctgcctaagtactccctgttcgagctggaaaacggccggaagagaatgctggcctctgccggcgaactgcagaagggaaacgaactggccctgccctccaaatatgtgaacttcctgtacctggccagccactatgagaagctgaagggctcccccgaggataatgagcagaaacagctgtttgtggaacagcacaagcactacctggacgagatcatcgagcagatcagcgagttctccaagagagtgatcctggccgacgctaatctggacaaagtgctgtccgcctacaacaagcaccgggataagcccatcagagagcaggccgagaatatcatccacctgtttaccctgaccaatctgggagcccctgccgccttcaagtactttgacaccaccatcgaccggaagaggtacaccagcaccaaagaggtgctggacgccaccctgatccaccagagcatcaccggcctgtacgagacacggatcgacctgtctcagctgggaggtgacagcggcggcagcagcggcggatctagcggcggcagcagcggcggatctagcggaggctcctccggcggcagcaccctgaacatcgaggacgagtacaggctgcacgagaccagcaaggagcccgacgtgagcctgggcagcacctggctgagcgatttccctcaggcttgggccgagaccggcggcatgggcctggccgtgcggcaggcccccctgattatccccctgaaggccaccagcacccccgtgagcatcaagcagtacccaatgtcccaggaggccaggctgggcatcaagcctcacatccagaggctgctggaccagggcatcctggtgccatgccagtccccctggaacacccctctgctgcccgtgaagaagcctggcaccaacgactaccggcccgtgcaggacctgagagaagtgaacaagcgggtggaggacatccacccaaccgtgcccaacccttacaacctgctgtccggcctgccccccagccaccagtggtacaccgtgctggacctgaaggacgccttcttctgcctgagactgcaccccacctctcagcccctgttcgccttcgagtggcgcgaccccgagatgggcatcagcggccagctgacctggaccagactgccacagggctttaagaatagcccaaccctgtttaacgaggccctgcacagggacctggccgacttcaggatccagcaccccgacctgattctgctgcagtacgtggacgacctgctgctggccgctaccagcgagctggactgccagcagggcaccagagccctgctgcagaccctgggcaacctgggctacagagccagcgccaagaaggcccagatctgtcagaagcaggtgaagtatctgggctacctgctgaaggaaggccagagatggctgaccgaggccagaaaggagactgtgatgggccagcccacccccaagacccccaggcagctgcgggagttcctgggcaaggccggcttttgcagactgtttatccctggcttcgccgagatggccgccccactgtaccctctgaccaagcctggcaccctgtttaactggggccccgaccagcagaaggcctaccaggagatcaagcaggccctgctgaccgcccccgccctgggcctgcccgacctgaccaagcctttcgagctgttcgtggacgagaagcagggatacgccaaaggcgtgctgacccagaagctgggcccctggcggaggcccgtggcctacctgagcaaaaaactggaccctgtggccgccggctggcccccatgcctgcggatggtggccgccatcgctgtgctgaccaaggacgccggcaagctgaccatgggccagcccctggtgatcctggcccctcacgccgtggaggctctggtgaagcagcctccagacaggtggctgtccaacgccaggatgacccactaccaggccctgctgctggacaccgaccgggtgcagttcggccctgtggtggccctgaaccccgccaccctgctgcctctgccagaggagggcctgcagcacaactgcctggacatcctggccgaggcccacggcaccaggcccgacctgaccgaccagcccctgcctgacgccgaccacacctggtacaccgacggcagctccctgctgcaggagggccagaggaaggccggcgccgccgtgaccaccgagaccgaggtgatctgggccaaagccctgcctgccggcacctccgcccagcgggccgagctgatcgccctgacccaggccctgaagatggctgagggcaagaagctgaacgtgtacaccgattccagatacgccttcgccaccgcccacatccacggcgagatctacagaagaaggggctggctgacctccgagggcaaggagatcaagaacaaggacgagattctggccctgctgaaggccctgttcctgcctaagagactgagcatcatccactgtcccggccaccagaagggccacagcgccgaggccagaggcaatagaatggccgaccaggccgccagaaaggccgccatcaccgagacccccgacaccagcaccctgctgatcgagaacagcagcccc

SEQ ID NO: 211 - RNA, 6204 nt, synthetic construct
  misc_feature 1..6204: note = Description of Artificial Sequence: Synthetic polynucleotide
  source 1..6204: mol_type = other RNA
gacaagaagtacagcatcggcctggacatcggcaccaactctgtgggctgggccgtgatcaccgacgagtacaaggtgcccagcaagaaattcaaggtgctgggcaacaccgaccggcacagcatcaagaagaacctgatcggagccctgctgttcgacagcggcgaaacagccgaggccacccggctgaagagaaccgccagaagaagatacaccagacggaagaaccggatctgctatctgcaagagatcttcagcaacgagatggccaaggtggacgacagcttcttccacagactggaagagtccttcctggtggaagaggataagaagcacgagcggcaccccatcttcggcaacatcgtggacgaggtggcctaccacgagaagtaccccaccatctaccacctgagaaagaaactggtggacagcaccgacaaggccgacctgcggctgatctatctggccctggcccacatgatcaagttccggggccacttcctgatcgagggcgacctgaaccccgacaacagcgacgtggacaagctgttcatccagctggtgcagacctacaaccagctgttcgaggaaaaccccatcaacgccagcggcgtggacgccaaggccatcctgtctgccagactgagcaagagcagacggctggaaaatctgatcgcccagctgcccggcgagaagaagaatggcctgttcggaaacctgattgccctgagcctgggcctgacccccaacttcaagagcaacttcgacctggccgaggatgccaaactgcagctgagcaaggacacctacgacgacgacctggacaacctgctggcccagatcggcgaccagtacgccgacctgtttctggccgccaagaacctgtccgacgccatcctgctgagcgacatcctgagagtgaacaccgagatcaccaaggcccccctgagcgcctctatgatcaagagatacgacgagcaccaccaggacctgaccctgctgaaagctctcgtgcggcagcagctgcctgagaagtacaaagagattttcttcgaccagagcaagaacggctacgccggctacattgacggcggagccagccaggaagagttctacaagttcatcaagcccatcctggaaaagatggacggcaccgaggaactgctcgtgaagctgaacagagaggacctgctgcggaagcagcggaccttcgacaacggcagcatcccccaccagatccacctgggagagctgcacgccattctgcggcggcaggaagatttttacccattcctgaaggacaaccgggaaaagatcgagaagatcctgaccttccgcatcccctactacgtgggccctctggccaggggaaacagcagattcgcctggatgaccagaaagagcgaggaaaccatcaccccctggaacttcgaggaagtggtggacaagggcgcttccgcccagagcttcatcgagcggatgaccaacttcgataagaacctgcccaacgagaaggtgctgcccaagcacagcctgctgtacgagtacttcaccgtgtataacgagctgaccaaagtgaaatacgtgaccgagggaatgagaaagcccgccttcctgagcggcgagcagaaaaaggccatcgtggacctgctgttcaagaccaaccggaaagtgaccgtgaagcagctgaaagaggactacttcaagaaaatcgagtgcttcgactccgtggaaatctccggcgtggaagatcggttcaacgcctccctgggcacataccacgatctgctgaaaattatcaaggacaaggacttcctggacaatgaggaaaacgaggacattctggaagatatcgtgctgaccctgacactgtttgaggacagagagatgatcgaggaacggctgaaaacctatgcccacctgttcgacgacaaagtgatgaagcagctgaagcggcggagatacaccggctggggcaggctgagccggaagctgatcaacggcatccgggacaagcagtccggcaagacaatcctggatttcctgaagtccgacggcttcgccaacagaaacttcatgcagctgatccacgacgacagcctgacctttaaagaggacatccagaaagcccaggtgtccggccagggcgatagcctgcacgagcacattgccaatctggccggcagccccgccattaagaagggcatcctgcagacagtgaaggtggtggacgagctcgtgaaagtgatgggccggcacaagcccgagaacatcgtgatcgaaatggccagagagaaccagaccacccagaagggacagaagaacagccgcgagagaatgaagcggatcgaagagggcatcaaagagctgggcagccagatcctgaaagaacaccccgtggaaaacacccagctgcagaacgagaagctgtacctgtactacctgcagaatgggcgggatatgtacgtggaccaggaactggacatcaaccggctgtccgactacgatgtggacgctatcgtgcctcagagctttctgaaggacgactccatcgacaacaaggtgctgaccagaagcgacaagaaccggggcaagagcgacaacgtgccctccgaagaggtcgtgaagaagatgaagaactactggcggcagctgctgaacgccaagctgattacccagagaaagttcgacaatctgaccaaggccgagagaggcggcctgagcgaactggataaggccggcttcatcaagagacagctggtggaaacccggcagatcacaaagcacgtggcacagatcctggactcccggatgaacactaagtacgacgagaatgacaagctgatccgggaagtgaaagtgatcaccctgaagtccaagctggtgtccgatttccggaaggatttccagttttacaaagtgcgcgagatcaacaactaccaccacgcccacgacgcctacctgaacgccgtcgtgggaaccgccctgatcaaaaagtaccctaagctggaaagcgagttcgtgtacggcgactacaaggtgtacgacgtgcggaagatgatcgccaagagcgagcaggaaatcggcaaggctaccgccaagtacttcttctacagcaacatcatgaactttttcaagaccgagattaccctggccaacggcgagatccggaagcggcctctgatcgagacaaacggcgaaaccggggagatcgtgtgggataagggccgggattttgccaccgtgcggaaagtgctgagcatgccccaagtgaatatcgtgaaaaagaccgaggtgcagacaggcggcttcagcaaagagtctatcctgcccaagaggaacagcgataagctgatcgccagaaagaaggactgggaccctaagaagtacggcggcttcgacagccccaccgtggcctattctgtgctggtggtggccaaagtggaaaagggcaagtccaagaaactgaagagtgtgaaagagctgctggggatcaccatcatggaaagaagcagcttcgagaagaatcccatcgactttctggaagccaagggctacaaagaagtgaaaaaggacctgatcatcaagctgcctaagtactccctgttcgagctggaaaacggccggaagagaatgctggcctctgccggcgaactgcagaagggaaacgaactggccctgccctccaaatatgtgaacttcctgtacctggccagccactatgagaagctgaagggctcccccgaggataatgagcagaaacagctgtttgtggaacagcacaagcactacctggacgagatcatcgagcagatcagcgagttctccaagagagtgatcctggccgacgctaatctggacaaagtgctgtccgcctacaacaagcaccgggataagcccatcagagagcaggccgagaatatcatccacctgtttaccctgaccaatctgggagcccctgccgccttcaagtactttgacaccaccatcgaccggaagaggtacaccagcaccaaagaggtgctggacgccaccctgatccaccagagcatcaccggcctgtacgagacacggatcgacctgtctcagctgggaggtgacagcggcggcagcagcggcggatctagcggcggcagcagcggcggatctagcggaggctcctccggcggcagcaccctgaacatcgaggacgagtacaggctgcacgagaccagcaaggagcccgacgtgagcctgggcagcacctggctgagcgatttccctcaggcttgggccgagaccggcggcatgggcctggccgtgcggcaggcccccctgattatccccctgaaggccaccagcacccccgtgagcatcaagcagtacccaatgtcccaggaggccaggctgggcatcaagcctcacatccagaggctgctggaccagggcatcctggtgccatgccagtccccctggaacacccctctgctgcccgtgaagaagcctggcaccaacgactaccggcccgtgcaggacctgagagaagtgaacaagcgggtggaggacatccacccaaccgtgcccaacccttacaacctgctgtccggcctgccccccagccaccagtggtacaccgtgctggacctgaaggacgccttcttctgcctgagactgcaccccacctctcagcccctgttcgccttcgagtggcgcgaccccgagatgggcatcagcggccagctgacctggaccagactgccacagggctttaagaatagcccaaccctgtttaacgaggccctgcacagggacctggccgacttcaggatccagcaccccgacctgattctgctgcagtacgtggacgacctgctgctggccgctaccagcgagctggactgccagcagggcaccagagccctgctgcagaccctgggcaacctgggctacagagccagcgccaagaaggcccagatctgtcagaagcaggtgaagtatctgggctacctgctgaaggaaggccagagatggctgaccgaggccagaaaggagactgtgatgggccagcccacccccaagacccccaggcagctgcgggagttcctgggcaaggccggcttttgcagactgtttatccctggcttcgccgagatggccgccccactgtaccctctgaccaagcctggcaccctgtttaactggggccccgaccagcagaaggcctaccaggagatcaagcaggccctgctgaccgcccccgccctgggcctgcccgacctgaccaagcctttcgagctgttcgtggacgagaagcagggatacgccaaaggcgtgctgacccagaagctgggcccctggcggaggcccgtggcctacctgagcaaaaaactggaccctgtggccgccggctggcccccatgcctgcggatggtggccgccatcgctgtgctgaccaaggacgccggcaagctgaccatgggccagcccctggtgatcctggcccctcacgccgtggaggctctggtgaagcagcctccagacaggtggctgtccaacgccaggatgacccactaccaggccctgctgctggacaccgaccgggtgcagttcggccctgtggtggccctgaaccccgccaccctgctgcctctgccagaggagggcctgcagcacaactgcctggacatcctggccgaggcccacggcaccaggcccgacctgaccgaccagcccctgcctgacgccgaccacacctggtacaccgacggcagctccctgctgcaggagggccagaggaaggccggcgccgccgtgaccaccgagaccgaggtgatctgggccaaagccctgcctgccggcacctccgcccagcgggccgagctgatcgccctgacccaggccctgaagatggctgagggcaagaagctgaacgtgtacaccgattccagatacgccttcgccaccgcccacatccacggcgagatctacagaagaaggggctggctgacctccgagggcaaggagatcaagaacaaggacgagattctggccctgctgaaggccctgttcctgcctaagagactgagcatcatccactgtcccggccaccagaagggccacagcgccgaggccagaggcaatagaatggccgaccaggccgccagaaaggccgccatcaccgagacccccgacaccagcaccctgctgatcgagaacagcagcccc

SEQ ID NO: 212 - protein, 1895 aa, synthetic construct
  REGION 1..1895: note = Description of Artificial Sequence: Synthetic polypeptide
DKKYSIGLDIGTNSVGWAVITDEYKVPSKKFKVLGNTDRHSIKKNLIGALLFDSGETAEATRLKRTARRRYTRRKNRICYLQEIFSNEMAKVDDSFFHRLEESFLVEEDKKHERHPIFGNIVDEVAYHEKYPTIYHLRKKLVDSTDKADLRLIYLALAHMIKFRGHFLIEGDLNPDNSDVDKLFIQLVQTYNQLFEENPINASGVDAKAILSARLSKSRRLENLIAQLPGEKKNGLFGNLIALSLGLTPNFKSNFDLAEDAKLQLSKDTYDDDLDNLLAQIGDQYADLFLAAKNLSDAILLSDILRVNTEITKAPLSASMIKRYDEHHQDLTLLKALVRQQLPEKYKEIFFDQSKNGYAGYIDGGASQEEFYKFIKPILEKMDGTEELLVKLNREDLLRKQRTFDNGSIPHQIHLGELHAILRRQEDFYPFLKDNREKIEKILTFRIPYYVGPLARGNSRFAWMTRKSEETITPWNFEEVVDKGASAQSFIERMTNFDKNLPNEKVLPKHSLLYEYFTVYNELTKVKYVTEGMRKPAFLSGEQKKAIVDLLFKTNRKVTVKQLKEDYFKKIECFDSVEISGVEDRFNASLGTYHDLLKIIKDKDFLDNEENEDILEDIVLTLTLFEDREMIEERLKTYAHLFDDKVMKQLKRRRYTGWGRLSRKLINGIRDKQSGKTILDFLKSDGFANRNFMQLIHDDSLTFKEDIQKAQVSGQGDSLHEHIANLAGSPAIKKGILQTVKVVDELVKVMGRHKPENIVIEMARENQTTQKGQKNSRERMKRIEEGIKELGSQILKEHPVENTQLQNEKLYLYYLQNGRDMYVDQELDINRLSDYDVDAIVPQSFLKDDSIDNKVLTRSDKNRGKSDNVPSEEVVKKMKNYWRQLLNAKLITQRKFDNLTKAERGGLSELDKAGFIKRQLVETRQITKHVAQILDSRMNTKYDENDKLIREVKVITLKSKLVSDFRKDFQFYKVREINNYHHAHDAYLNAVVGTALIKKYPKLESEFVYGDYKVYDVRKMIAKSEQEIGKATAKYFFYSNIMNFFKTEITLANGEIRKRPLIETNGETGEIVWDKGRDFATVRKVLSMPQVNIVKKTEVQTGGFSKESILPKRNSDKLIARKKDWDPKKYGGFDSPTVAYSVLVVAKVEKGKSKKLKSVKELLGITIMERSSFEKNPIDFLEAKGYKEVKKDLIIKLPKYSLFELENGRKRMLASAGELQKGNELALPSKYVNFLYLASHYEKLKGSPEDNEQKQLFVEQHKHYLDEIIEQISEFSKRVILADANLDKVLSAYNKHRDKPIREQAENIIHLFTLTNLGAPAAFKYFDTTIDRKRYTSTKEVLDATLIHQSITGLYETRIDLSQLGGDSGGSSGGSSGGSSGGSSGGSSGGSTLNIEDEYRLHETSKEPDVSLGSTWLSDFPQAWAETGGMGLAVRQAPLIIPLKATSTPVSIKQYPMSQEARLGIKPHIQRLLDQGILVPCQSPWNTPLLPVKKPGTNDYRPVQDLREVNKRVEDIHPTVPNPYNLLSGLPPSHQWYTVLDLKDAFFCLRLHPTSQPLFAFEWRDPEMGISGQLTWTRLPQGFKNSPTLFNEALHRDLADFRIQHPDLILLQYVDDLLLAATSELDCQQGTRALLQTLGNLGYRASAKKAQICQKQVKYLGYLLKEGQRWLTEARKETVMGQPTPKTPRQLREFLGKAGFCRLFIPGFAEMAAPLYPLTKPGTLFNWGPDQQKAYQEIKQALLTAPALGLPDLTKPFELFVDEKQGYAKGVLTQKLGPWRRPVAYLSKKLDPVAAGWPPCLRMVAAIAVLTKDAGKLTMGQPLVILAPHAVEALVKQPPDRWLSNARMTHYQALLLDTDRVQFGPVVALNPATLLPLPEEGLQHNCLDILAEAHG

SEQ ID NO: 213 - DNA, 5685 bp, synthetic construct
  misc_feature 1..5685: note = Description of Artificial Sequence: Synthetic polynucleotide
  source 1..5685: mol_type = other DNA
gacaagaagtacagcatcggcctggacatcggcaccaactctgtgggctgggccgtgatcaccgacgagtacaaggtgcccagcaagaaattcaaggtgctgggcaacaccgaccggcacagcatcaagaagaacctgatcggagccctgctgttcgacagcggcgaaacagccgaggccacccggctgaagagaaccgccagaagaagatacaccagacggaagaaccggatctgctatctgcaagagatcttcagcaacgagatggccaaggtggacgacagcttcttccacagactggaagagtccttcctggtggaagaggataagaagcacgagcggcaccccatcttcggcaacatcgtggacgaggtggcctaccacgagaagtaccccaccatctaccacctgagaaagaaactggtggacagcaccgacaaggccgacctgcggctgatctatctggccctggcccacatgatcaagttccggggccacttcctgatcgagggcgacctgaaccccgacaacagcgacgtggacaagctgttcatccagctggtgcagacctacaaccagctgttcgaggaaaaccccatcaacgccagcggcgtggacgccaaggccatcctgtctgccagactgagcaagagcagacggctggaaaatctgatcgcccagctgcccggcgagaagaagaatggcctgttcggaaacctgattgccctgagcctgggcctgacccccaacttcaagagcaacttcgacctggccgaggatgccaaactgcagctgagcaaggacacctacgacgacgacctggacaacctgctggcccagatcggcgaccagtacgccgacctgtttctggccgccaagaacctgtccgacgccatcctgctgagcgacatcctgagagtgaacaccgagatcaccaaggcccccctgagcgcctctatgatcaagagatacgacgagcaccaccaggacctgaccctgctgaaagctctcgtgcggcagcagctgcctgagaagtacaaagagattttcttcgaccagagcaagaacggctacgccggctacattgacggcggagccagccaggaagagttctacaagttcatcaagcccatcctggaaaagatggacggcaccgaggaactgctcgtgaagctgaacagagaggacctgctgcggaagcagcggaccttcgacaacggcagcatcccccaccagatccacctgggagagctgcacgccattctgcggcggcaggaagatttttacccattcctgaaggacaaccgggaaaagatcgagaagatcctgaccttccgcatcccctactacgtgggccctctggccaggggaaacagcagattcgcctggatgaccagaaagagcgaggaaaccatcaccccctggaacttcgaggaagtggtggacaagggcgcttccgcccagagcttcatcgagcggatgaccaacttcgataagaacctgcccaacgagaaggtgctgcccaagcacagcctgctgtacgagtacttcaccgtgtataacgagctgaccaaagtgaaatacgtgaccgagggaatgagaaagcccgccttcctgagcggcgagcagaaaaaggccatcgtggacctgctgttcaagaccaaccggaaagtgaccgtgaagcagctgaaagaggactacttcaagaaaatcgagtgcttcgactccgtggaaatctccggcgtggaagatcggttcaacgcctccctgggcacataccacgatctgctgaaaattatcaaggacaaggacttcctggacaatgaggaaaacgaggacattctggaagatatcgtgctgaccctgacactgtttgaggacagagagatgatcgaggaacggctgaaaacctatgcccacctgttcgacgacaaagtgatgaagcagctgaagcggcggagatacaccggctggggcaggctgagccggaagctgatcaacggcatccgggacaagcagtccggcaagacaatcctggatttcctgaagtccgacggcttcgccaacagaaacttcatgcagctgatccacgacgacagcctgacctttaaagaggacatccagaaagcccaggtgtccggccagggcgatagcctgcacgagcacattgccaatctggccggcagccccgccattaagaagggcatcctgcagacagtgaaggtggtggacgagctcgtgaaagtgatgggccggcacaagcccgagaacatcgtgatcgaaatggccagagagaaccagaccacccagaagggacagaagaacagccgcgagagaatgaagcggatcgaagagggcatcaaagagctgggcagccagatcctgaaagaacaccccgtggaaaacacccagctgcagaacgagaagctgtacctgtactacctgcagaatgggcgggatatgtacgtggaccaggaactggacatcaaccggctgtccgactacgatgtggacgctatcgtgcctcagagctttctgaaggacgactccatcgacaacaaggtgctgaccagaagcgacaagaaccggggcaagagcgacaacgtgccctccgaagaggtcgtgaagaagatgaagaactactggcggcagctgctgaacgccaagctgattacccagagaaagttcgacaatctgaccaaggccgagagaggcggcctgagcgaactggataaggccggcttcatcaagagacagctggtggaaacccggcagatcacaaagcacgtggcacagatcctggactcccggatgaacactaagtacgacgagaatgacaagctgatccgggaagtgaaagtgatcaccctgaagtccaagctggtgtccgatttccggaaggatttccagttttacaaagtgcgcgagatcaacaactaccaccacgcccacgacgcctacctgaacgccgtcgtgggaaccgccctgatcaaaaagtaccctaagctggaaagcgagttcgtgtacggcgactacaaggtgtacgacgtgcggaagatgatcgccaagagcgagcaggaaatcggcaaggctaccgccaagtacttcttctacagcaacatcatgaactttttcaagaccgagattaccctggccaacggcgagatccggaagcggcctctgatcgagacaaacggcgaaaccggggagatcgtgtgggataagggccgggattttgccaccgtgcggaaagtgctgagcatgccccaagtgaatatcgtgaaaaagaccgaggtgcagacaggcggcttcagcaaagagtctatcctgcccaagaggaacagcgataagctgatcgccagaaagaaggactgggaccctaagaagtacggcggcttcgacagccccaccgtggcctattctgtgctggtggtggccaaagtggaaaagggcaagtccaagaaactgaagagtgtgaaagagctgctggggatcaccatcatggaaagaagcagcttcgagaagaatcccatcgactttctggaagccaagggctacaaagaagtgaaaaaggacctgatcatcaagctgcctaagtactccctgttcgagctggaaaacggccggaagagaatgctggcctctgccggcgaactgcagaagggaaacgaactggccctgccctccaaatatgtgaacttcctgtacctggccagccactatgagaagctgaagggctcccccgaggataatgagcagaaacagctgtttgtggaacagcacaagcactacctggacgagatcatcgagcagatcagcgagttctccaagagagtgatcctggccgacgctaatctggacaaagtgctgtccgcctacaacaagcaccgggataagcccatcagagagcaggccgagaatatcatccacctgtttaccctgaccaatctgggagcccctgccgccttcaagtactttgacaccaccatcgaccggaagaggtacaccagcaccaaagaggtgctggacgccaccctgatccaccagagcatcaccggcctgtacgagacacggatcgacctgtctcagctgggaggtgacagcggcggcagcagcggcggatctagcggcggcagcagcggcggatctagcggaggctcctccggcggcagcaccctgaacatcgaggacgagtacaggctgcacgagaccagcaaggagcccgacgtgagcctgggcagcacctggctgagcgatttccctcaggcttgggccgagaccggcggcatgggcctggccgtgcggcaggcccccctgattatccccctgaaggccaccagcacccccgtgagcatcaagcagtacccaatgtcccaggaggccaggctgggcatcaagcctcacatccagaggctgctggaccagggcatcctggtgccatgccagtccccctggaacacccctctgctgcccgtgaagaagcctggcaccaacgactaccggcccgtgcaggacctgagagaagtgaacaagcgggtggaggacatccacccaaccgtgcccaacccttacaacctgctgtccggcctgccccccagccaccagtggtacaccgtgctggacctgaaggacgccttcttctgcctgagactgcaccccacctctcagcccctgttcgccttcgagtggcgcgaccccgagatgggcatcagcggccagctgacctggaccagactgccacagggctttaagaatagcccaaccctgtttaacgaggccctgcacagggacctggccgacttcaggatccagcaccccgacctgattctgctgcagtacgtggacgacctgctgctggccgctaccagcgagctggactgccagcagggcaccagagccctgctgcagaccctgggcaacctgggctacagagccagcgccaagaaggcccagatctgtcagaagcaggtgaagtatctgggctacctgctgaaggaaggccagagatggctgaccgaggccagaaaggagactgtgatgggccagcccacccccaagacccccaggcagctgcgggagttcctgggcaaggccggcttttgcagactgtttatccctggcttcgccgagatggccgccccactgtaccctctgaccaagcctggcaccctgtttaactggggccccgaccagcagaaggcctaccaggagatcaagcaggccctgctgaccgcccccgccctgggcctgcccgacctgaccaagcctttcgagctgttcgtggacgagaagcagggatacgccaaaggcgtgctgacccagaagctgggcccctggcggaggcccgtggcctacctgagcaaaaaactggaccctgtggccgccggctggcccccatgcctgcggatggtggccgccatcgctgtgctgaccaaggacgccggcaagctgaccatgggccagcccctggtgatcctggcccctcacgccgtggaggctctggtgaagcagcctccagacaggtggctgtccaacgccaggatgacccactaccaggccctgctgctggacaccgaccgggtgcagttcggccctgtggtggccctgaaccccgccaccctgctgcctctgccagaggagggcctgcagcacaactgcctggacatcctggccgaggcccacggc

SEQ ID NO: 214 - RNA, 5685 nt, synthetic construct
  misc_feature 1..5685: note = Description of Artificial Sequence: Synthetic polynucleotide
  source 1..5685: mol_type = other RNA
gacaagaagtacagcatcggcctggacatcggcaccaactctgtgggctgggccgtgatcaccgacgagtacaaggtgcccagcaagaaattcaaggtgctgggcaacaccgaccggcacagcatcaagaagaacctgatcggagccctgctgttcgacagcggcgaaacagccgaggccacccggctgaagagaaccgccagaagaagatacaccagacggaagaaccggatctgctatctgcaagagatcttcagcaacgagatggccaaggtggacgacagcttcttccacagactggaagagtccttcctggtggaagaggataagaagcacgagcggcaccccatcttcggcaacatcgtggacgaggtggcctaccacgagaagtaccccaccatctaccacctgagaaagaaactggtggacagcaccgacaaggccgacctgcggctgatctatctggccctggcccacatgatcaagttccggggccacttcctgatcgagggcgacctgaaccccgacaacagcgacgtggacaagctgttcatccagctggtgcagacctacaaccagctgttcgaggaaaaccccatcaacgccagcggcgtggacgccaaggccatcctgtctgccagactgagcaagagcagacggctggaaaatctgatcgcccagctgcccggcgagaagaagaatggcctgttcggaaacctgattgccctgagcctgggcctgacccccaacttcaagagcaacttcgacctggccgaggatgccaaactgcagctgagcaaggacacctacgacgacgacctggacaacctgctggcccagatcggcgaccagtacgccgacctgtttctggccgccaagaacctgtccgacgccatcctgctgagcgacatcctgagagtgaacaccgagatcaccaaggcccccctgagcgcctctatgatcaagagatacgacgagcaccaccaggacctgaccctgctgaaagctctcgtgcggcagcagctgcctgagaagtacaaagagattttcttcgaccagagcaagaacggctacgccggctacattgacggcggagccagccaggaagagttctacaagttcatcaagcccatcctggaaaagatggacggcaccgaggaactgctcgtgaagctgaacagagaggacctgctgcggaagcagcggaccttcgacaacggcagcatcccccaccagatccacctgggagagctgcacgccattctgcggcggcaggaagatttttacccattcctgaaggacaaccgggaaaagatcgagaagatcctgaccttccgcatcccctactacgtgggccctctggccaggggaaacagcagattcgcctggatgaccagaaagagcgaggaaaccatcaccccctggaacttcgaggaagtggtggacaagggcgcttccgcccagagcttcatcgagcggatgaccaacttcgataagaacctgcccaacgagaaggtgctgcccaagcacagcctgctgtacgagtacttcaccgtgtataacgagctgaccaaagtgaaatacgtgaccgagggaatgagaaagcccgccttcctgagcggcgagcagaaaaaggccatcgtggacctgctgttcaagaccaaccggaaagtgaccgtgaagcagctgaaagaggactacttcaagaaaatcgagtgcttcgactccgtggaaatctccggcgtggaagatcggttcaacgcctccctgggcacataccacgatctgctgaaaattatcaaggacaaggacttcctggacaatgaggaaaacgaggacattctggaagatatcgtgctgaccctgacactgtttgaggacagagagatgatcgaggaacggctgaaaacctatgcccacctgttcgacgacaaagtgatgaagcagctgaagcggcggagatacaccggctggggcaggctgagccggaagctgatcaacggcatccgggacaagcagtccggcaagacaatcctggatttcctgaagtccgacggcttcgccaacagaaacttcatgcagctgatccacgacgacagcctgacctttaaagaggacatccagaaagcccaggtgtccggccagggcgatagcctgcacgagcacattgccaatctggccggcagccccgccattaagaagggcatcctgcagacagtgaaggtggtggacgagctcgtgaaagtgatgggccggcacaagcccgagaacatcgtgatcgaaatggccagagagaaccagaccacccagaagggacagaagaacagccgcgagagaatgaagcggatcgaagagggcatcaaagagctgggcagccagatcctgaaagaacaccccgtggaaaacacccagctgcagaacgagaagctgtacctgtactacctgcagaatgggcgggatatgtacgtggaccaggaactggacatcaaccggctgtccgactacgatgtggacgctatcgtgcctcagagctttctgaaggacgactccatcgacaacaaggtgctgaccagaagcgacaagaaccggggcaagagcgacaacgtgccctccgaagaggtcgtgaagaagatgaagaactactggcggcagctgctgaacgccaagctgattacccagagaaagttcgacaatctgaccaaggccgagagaggcggcctgagcgaactggataaggccggcttcatcaagagacagctggtggaaacccggcagatcacaaagcacgtggcacagatcctggactcccggatgaacactaagtacgacgagaatgacaagctgatccgggaagtgaaagtgatcaccctgaagtccaagctggtgtccgatttccggaaggatttccagttttacaaagtgcgcgagatcaacaactaccaccacgcccacgacgcctacctgaacgccgtcgtgggaaccgccctgatcaaaaagtaccctaagctggaaagcgagttcgtgtacggcgactacaaggtgtacgacgtgcggaagatgatcgccaagagcgagcaggaaatcggcaaggctaccgccaagtacttcttctacagcaacatcatgaactttttcaagaccgagattaccctggccaacggcgagatccggaagcggcctctgatcgagacaaacggcgaaaccggggagatcgtgtgggataagggccgggattttgccaccgtgcggaaagtgctgagcatgccccaagtgaatatcgtgaaaaagaccgaggtgcagacaggcggcttcagcaaagagtctatcctgcccaagaggaacagcgataagctgatcgccagaaagaaggactgggaccctaagaagtacggcggcttcgacagccccaccgtggcctattctgtgctggtggtggccaaagtggaaaagggcaagtccaagaaactgaagagtgtgaaagagctgctggggatcaccatcatggaaagaagcagcttcgagaagaatcccatcgactttctggaagccaagggctacaaagaagtgaaaaaggacctgatcatcaagctgcctaagtactccctgttcgagctggaaaacggccggaagagaatgctggcctctgccggcgaactgcagaagggaaacgaactggccctgccctccaaatatgtgaacttcctgtacctggccagccactatgagaagctgaagggctcccccgaggataatgagcagaaacagctgtttgtggaacagcacaagcactacctggacgagatcatcgagcagatcagcgagttctccaagagagtgatcctggccgacgctaatctggacaaagtgctgtccgcctacaacaagcaccgggataagcccatcagagagcaggccgagaatatcatccacctgtttaccctgaccaatctgggagcccctgccgccttcaagtactttgacaccaccatcgaccggaagaggtacaccagcaccaaagaggtgctggacgccaccctgatccaccagagcatcaccggcctgtacgagacacggatcgacctgtctcagctgggaggtgacagcggcggcagcagcggcggatctagcggcggcagcagcggcggatctagcggaggctcctccggcggcagcaccctgaacatcgaggacgagtacaggctgcacgagaccagcaaggagcccgacgtgagcctgggcagcacctggctgagcgatttccctcaggcttgggccgagaccggcggcatgggcctggccgtgcggcaggcccccctgattatccccctgaaggccaccagcacccccgtgagcatcaagcagtacccaatgtcccaggaggccaggctgggcatcaagcctcacatccagaggctgctggaccagggcatcctggtgccatgccagtccccctggaacacccctctgctgcccgtgaagaagcctggcaccaacgactaccggcccgtgcaggacctgagagaagtgaacaagcgggtggaggacatccacccaaccgtgcccaacccttacaacctgctgtccggcctgccccccagccaccagtggtacaccgtgctggacctgaaggacgccttcttctgcctgagactgcaccccacctctcagcccctgttcgccttcgagtggcgcgaccccgagatgggcatcagcggccagctgacctggaccagactgccacagggctttaagaatagcccaaccctgtttaacgaggccctgcacagggacctggccgacttcaggatccagcaccccgacctgattctgctgcagtacgtggacgacctgctgctggccgctaccagcgagctggactgccagcagggcaccagagccctgctgcagaccctgggcaacctgggctacagagccagcgccaagaaggcccagatctgtcagaagcaggtgaagtatctgggctacctgctgaaggaaggccagagatggctgaccgaggccagaaaggagactgtgatgggccagcccacccccaagacccccaggcagctgcgggagttcctgggcaaggccggcttttgcagactgtttatccctggcttcgccgagatggccgccccactgtaccctctgaccaagcctggcaccctgtttaactggggccccgaccagcagaaggcctaccaggagatcaagcaggccctgctgaccgcccccgccctgggcctgcccgacctgaccaagcctttcgagctgttcgtggacgagaagcagggatacgccaaaggcgtgctgacccagaagctgggcccctggcggaggcccgtggcctacctgagcaaaaaactggaccctgtggccgccggctggcccccatgcctgcggatggtggccgccatcgctgtgctgaccaaggacgccggcaagctgaccatgggccagcccctggtgatcctggcccctcacgccgtggaggctctggtgaagcagcctccagacaggtggctgtccaacgccaggatgacccactaccaggccctgctgctggacaccgaccgggtgcagttcggccctgtggtggccctgaaccccgccaccctgctgcctctgccagaggagggcctgcagcacaactgcctggacatcctggccgaggcccacggc

SEQ ID NO: 215 - protein, 2084 aa, synthetic construct
  REGION 1..2084: note = Description of Artificial Sequence: Synthetic polypeptide
DKKYSIGLDIGTNSVGWAVITDEYKVPSKKFKVLGNTDRHSIKKNLIGALLFDSGETAEATRLKRTARRRYTRRKNRICYLQEIFSNEMAKVDDSFFHRLEESFLVEEDKKHERHPIFGNIVDEVAYHEKYPTIYHLRKKLVDSTDKADLRLIYLALAHMIKFRGHFLIEGDLNPDNSDVDKLFIQLVQTYNQLFEENPINASGVDAKAILSARLSKSRRLENLIAQLPGEKKNGLFGNLIALSLGLTPNFKSNFDLAEDAKLQLSKDTYDDDLDNLLAQIGDQYADLFLAAKNLSDAILLSDILRVNTEITKAPLSASMIKRYDEHHQDLTLLKALVRQQLPEKYKEIFFDQSKNGYAGYIDGGASQEEFYKFIKPILEKMDGTEELLVKLNREDLLRKQRTFDNGSIPHQIHLGELHAILRRQEDFYPFLKDNREKIEKILTFRIPYYVGPLARGNSRFAWMTRKSEETITPWNFEEVVDKGASAQSFIERMTNFDKNLPNEKVLPKHSLLYEYFTVYNELTKVKYVTEGMRKPAFLSGEQKKAIVDLLFKTNRKVTVKQLKEDYFKKIECFDSVEISGVEDRFNASLGTYHDLLKIIKDKDFLDNEENEDILEDIVLTLTLFEDREMIEERLKTYAHLFDDKVMKQLKRRRYTGWGRLSRKLINGIRDKQSGKTILDFLKSDGFANRNFMQLIHDDSLTFKEDIQKAQVSGQGDSLHEHIANLAGSPAIKKGILQTVKVVDELVKVMGRHKPENIVIEMARENQTTQKGQKNSRERMKRIEEGIKELGSQILKEHPVENTQLQNEKLYLYYLQNGRDMYVDQELDINRLSDYDVDAIVPQSFLKDDSIDNKVLTRSDKNRGKSDNVPSEEVVKKMKNYWRQLLNAKLITQRKFDNLTKAERGGLSELDKAGFIKRQLVETRQITKHVAQILDSRMNTKYDENDKLIREVKVITLKSKLVSDFRKDFQFYKVREINNYHHAHDAYLNAVVGTALIKKYPKLESEFVYGDYKVYDVRKMIAKSEQEIGKATAKYFFYSNIMNFFKTEITLANGEIRKRPLIETNGETGEIVWDKGRDFATVRKVLSMPQVNIVKKTEVQTGGFSKESILPKRNSDKLIARKKDWDPKKYGGFDSPTVAYSVLVVAKVEKGKSKKLKSVKELLGITIMERSSFEKNPIDFLEAKGYKEVKKDLIIKLPKYSLFELENGRKRMLASAGELQKGNELALPSKYVNFLYLASHYEKLKGSPEDNEQKQLFVEQHKHYLDEIIEQISEFSKRVILADANLDKVLSAYNKHRDKPIREQAENIIHLFTLTNLGAPAAFKYFDTTIDRKRYTSTKEVLDATLIHQSITGLYETRIDLSQLGGDSGGSSGGSSGGSSGGSSGGSSGGSSGGSSGGSSGGSSGGSTLNIEDEYRLHETSKEPDVSLGSTWLSDFPQAWAETGGMGLAVRQAPLIIPLKATSTPVSIKQYPMSQEARLGIKPHIQRLLDQGILVPCQSPWNTPLLPVKKPGTNDYRPVQDLREVNKRVEDIHPTVPNPYNLLSGLPPSHQWYTVLDLKDAFFCLRLHPTSQPLFAFEWRDPEMGISGQLTWTRLPQGFKNSPTLFNEALHRDLADFRIQHPDLILLQYVDDLLLAATSELDCQQGTRALLQTLGNLGYRASAKKAQICQKQVKYLGYLLKEGQRWLTEARKETVMGQPTPKTPRQLREFLGKAGFCRLFIPGFAEMAAPLYPLTKPGTLFNWGPDQQKAYQEIKQALLTAPALGLPDLTKPFELFVDEKQGYAKGVLTQKLGPWRRPVAYLSKKLDPVAAGWPPCLRMVAAIAVLTKDAGKLTMGQPLVILAPHAVEALVKQPPDRWLSNARMTHYQALLLDTDRVQFGPVVALNPATLLPLPEEGLQHNCLDILAEAHGTRPDLTDQPLPDADHTWYTDGSSLLQEGQRKAGAAVTTETEVIWAKALPAGTSAQRAELIALTQALKMAEGKKLNVYTDSRYAFATAHIHGEIYRRRGWLTSEGKEIKNKDEILALLKALFLPKRLSIIHCPGHQKGHSAEARGNRMADQAARKAAITETPDTSTLLIENSSP

SEQ ID NO: 216 - DNA, 6252 bp, synthetic construct
  misc_feature 1..6252: note = Description of Artificial Sequence: Synthetic polynucleotide
  source 1..6252: mol_type = other DNA
gacaagaagtacagcatcggcctggacatcggcaccaactctgtgggctgggccgtgatcaccgacgagtacaaggtgcccagcaagaaattcaaggtgctgggcaacaccgaccggcacagcatcaagaagaacctgatcggagccctgctgttcgacagcggcgaaacagccgaggccacccggctgaagagaaccgccagaagaagatacaccagacggaagaaccggatctgctatctgcaagagatcttcagcaacgagatggccaaggtggacgacagcttcttccacagactggaagagtccttcctggtggaagaggataagaagcacgagcggcaccccatcttcggcaacatcgtggacgaggtggcctaccacgagaagtaccccaccatctaccacctgagaaagaaactggtggacagcaccgacaaggccgacctgcggctgatctatctggccctggcccacatgatcaagttccggggccacttcctgatcgagggcgacctgaaccccgacaacagcgacgtggacaagctgttcatccagctggtgcagacctacaaccagctgttcgaggaaaaccccatcaacgccagcggcgtggacgccaaggccatcctgtctgccagactgagcaagagcagacggctggaaaatctgatcgcccagctgcccggcgagaagaagaatggcctgttcggaaacctgattgccctgagcctgggcctgacccccaacttcaagagcaacttcgacctggccgaggatgccaaactgcagctgagcaaggacacctacgacgacgacctggacaacctgctggcccagatcggcgaccagtacgccgacctgtttctggccgccaagaacctgtccgacgccatcctgctgagcgacatcctgagagtgaacaccgagatcaccaaggcccccctgagcgcctctatgatcaagagatacgacgagcaccaccaggacctgaccctgctgaaagctctcgtgcggcagcagctgcctgagaagtacaaagagattttcttcgaccagagcaagaacggctacgccggctacattgacggcggagccagccaggaagagttctacaagttcatcaagcccatcctggaaaagatggacggcaccgaggaactgctcgtgaagctgaacagagaggacctgctgcggaagcagcggaccttcgacaacggcagcatcccccaccagatccacctgggagagctgcacgccattctgcggcggcaggaagatttttacccattcctgaaggacaaccgggaaaagatcgagaagatcctgaccttccgcatcccctactacgtgggccctctggccaggggaaacagcagattcgcctggatgaccagaaagagcgaggaaaccatcaccccctggaacttcgaggaagtggtggacaagggcgcttccgcccagagcttcatcgagcggatgaccaacttcgataagaacctgcccaacgagaaggtgctgcccaagcacagcctgctgtacgagtacttcaccgtgtataacgagctgaccaaagtgaaatacgtgaccgagggaatgagaaagcccgccttcctgagcggcgagcagaaaaaggccatcgtggacctgctgttcaagaccaaccggaaagtgaccgtgaagcagctgaaagaggactacttcaagaaaatcgagtgcttcgactccgtggaaatctccggcgtggaagatcggttcaacgcctccctgggcacataccacgatctgctgaaaattatcaaggacaaggacttcctggacaatgaggaaaacgaggacattctggaagatatcgtgctgaccctgacactgtttgaggacagagagatgatcgaggaacggctgaaaacctatgcccacctgttcgacgacaaagtgatgaagcagctgaagcggcggagatacaccggctggggcaggctgagccggaagctgatcaacggcatccgggacaagcagtccggcaagacaatcctggatttcctgaagtccgacggcttcgccaacagaaacttcatgcagctgatccacgacgacagcctgacctttaaagaggacatccagaaagcccaggtgtccggccagggcgatagcctgcacgagcacattgccaatctggccggcagccccgccattaagaagggcatcctgcagacagtgaaggtggtggacgagctcgtgaaagtgatgggccggcacaagcccgagaacatcgtgatcgaaatggccagagagaaccagaccacccagaagggacagaagaacagccgcgagagaatgaagcggatcgaagagggcatcaaagagctgggcagccagatcctgaaagaacaccccgtggaaaacacccagctgcagaacgagaagctgtacctgtactacctgcagaatgggcgggatatgtacgtggaccaggaactggacatcaaccggctgtccgactacgatgtggacgctatcgtgcctcagagctttctgaaggacgactccatcgacaacaaggtgctgaccagaagcgacaagaaccggggcaagagcgacaacgtgccctccgaagaggtcgtgaagaagatgaagaactactggcggcagctgctgaacgccaagctgattacccagagaaagttcgacaatctgaccaaggccgagagaggcggcctgagcgaactggataaggccggcttcatcaagagacagctggtggaaacccggcagatcacaaagcacgtggcacagatcctggactcccggatgaacactaagtacgacgagaatgacaagctgatccgggaagtgaaagtgatcaccctgaagtccaagctggtgtccgatttccggaaggatttccagttttacaaagtgcgcgagatcaacaactaccaccacgcccacgacgcctacctgaacgccgtcgtgggaaccgccctgatcaaaaagtaccctaagctggaaagcgagttcgtgtacggcgactacaaggtgtacgacgtgcggaagatgatcgccaagagcgagcaggaaatcggcaaggctaccgccaagtacttcttctacagcaacatcatgaactttttcaagaccgagattaccctggccaacggcgagatccggaagcggcctctgatcgagacaaacggcgaaaccggggagatcgtgtgggataagggccgggattttgccaccgtgcggaaagtgctgagcatgccccaagtgaatatcgtgaaaaagaccgaggtgcagacaggcggcttcagcaaagagtctatcctgcccaagaggaacagcgataagctgatcgccagaaagaaggactgggaccctaagaagtacggcggcttcgacagccccaccgtggcctattctgtgctggtggtggccaaagtggaaaagggcaagtccaagaaactgaagagtgtgaaagagctgctggggatcaccatcatggaaagaagcagcttcgagaagaatcccatcgactttctggaagccaagggctacaaagaagtgaaaaaggacctgatcatcaagctgcctaagtactccctgttcgagctggaaaacggccggaagagaatgctggcctctgccggcgaactgcagaagggaaacgaactggccctgccctccaaatatgtgaacttcctgtacctggccagccactatgagaagctgaagggctcccccgaggataatgagcagaaacagctgtttgtggaacagcacaagcactacctggacgagatcatcgagcagatcagcgagttctccaagagagtgatcctggccgacgctaatctggacaaagtgctgtccgcctacaacaagcaccgggataagcccatcagagagcaggccgagaatatcatccacctgtttaccctgaccaatctgggagcccctgccgccttcaagtactttgacaccaccatcgaccggaagaggtacaccagcaccaaagaggtgctggacgccaccctgatccaccagagcatcaccggcctgtacgagacacggatcgacctgtctcagctgggaggtgactccggcggctcttctggtggcagcagcggcggaagcagcggcggctctagcggcggcagcagcggcggctcctccggcggatctagcggcggcagcagcggaggcagcagcggcggaagcaccctgaacatcgaggacgagtacaggctgcacgagaccagcaaggagcccgacgtgagcctgggcagcacctggctgagcgatttccctcaggcttgggccgagaccggcggcatgggcctggccgtgcggcaggcccccctgattatccccctgaaggccaccagcacccccgtgagcatcaagcagtacccaatgtcccaggaggccaggctgggcatcaagcctcacatccagaggctgctggaccagggcatcctggtgccatgccagtccccctggaacacccctctgctgcccgtgaagaagcctggcaccaacgactaccggcccgtgcaggacctgagagaagtgaacaagcgggtggaggacatccacccaaccgtgcccaacccttacaacctgctgtccggcctgccccccagccaccagtggtacaccgtgctggacctgaaggacgccttcttctgcctgagactgcaccccacctctcagcccctgttcgccttcgagtggcgcgaccccgagatgggcatcagcggccagctgacctggaccagactgccacagggctttaagaatagcccaaccctgtttaacgaggccctgcacagggacctggccgacttcaggatccagcaccccgacctgattctgctgcagtacgtggacgacctgctgctggccgctaccagcgagctggactgccagcagggcaccagagccctgctgcagaccctgggcaacctgggctacagagccagcgccaagaaggcccagatctgtcagaagcaggtgaagtatctgggctacctgctgaaggaaggccagagatggctgaccgaggccagaaaggagactgtgatgggccagcccacccccaagacccccaggcagctgcgggagttcctgggcaaggccggcttttgcagactgtttatccctggcttcgccgagatggccgccccactgtaccctctgaccaagcctggcaccctgtttaactggggccccgaccagcagaaggcctaccaggagatcaagcaggccctgctgaccgcccccgccctgggcctgcccgacctgaccaagcctttcgagctgttcgtggacgagaagcagggatacgccaaaggcgtgctgacccagaagctgggcccctggcggaggcccgtggcctacctgagcaaaaaactggaccctgtggccgccggctggcccccatgcctgcggatggtggccgccatcgctgtgctgaccaaggacgccggcaagctgaccatgggccagcccctggtgatcctggcccctcacgccgtggaggctctggtgaagcagcctccagacaggtggctgtccaacgccaggatgacccactaccaggccctgctgctggacaccgaccgggtgcagttcggccctgtggtggccctgaaccccgccaccctgctgcctctgccagaggagggcctgcagcacaactgcctggacatcctggccgaggcccacggcaccaggcccgacctgaccgaccagcccctgcctgacgccgaccacacctggtacaccgacggcagctccctgctgcaggagggccagaggaaggccggcgccgccgtgaccaccgagaccgaggtgatctgggccaaagccctgcctgccggcacctccgcccagcgggccgagctgatcgccctgacccaggccctgaagatggctgagggcaagaagctgaacgtgtacaccgattccagatacgccttcgccaccgcccacatccacggcgagatctacagaagaaggggctggctgacctccgagggcaaggagatcaagaacaaggacgagattctggccctgctgaaggccctgttcctgcctaagagactgagcatcatccactgtcccggccaccagaagggccacagcgccgaggccagaggcaatagaatggccgaccaggccgccagaaaggccgccatcaccgagacccccgacaccagcaccctgctgatcgagaacagcagcccc

SEQ ID NO: 217 - RNA, 6252 nt, synthetic construct
  misc_feature 1..6252: note = Description of Artificial Sequence: Synthetic polynucleotide
  source 1..6252: mol_type = other RNA
gacaagaagtacagcatcggcctggacatcggcaccaactctgtgggctgggccgtgatcaccgacgagtacaaggtgcccagcaagaaattcaaggtgctgggcaacaccgaccggcacagcatcaagaagaacctgatcggagccctgctgttcgacagcggcgaaacagccgaggccacccggctgaagagaaccgccagaagaagatacaccagacggaagaaccggatctgctatctgcaagagatcttcagcaacgagatggccaaggtggacgacagcttcttccacagactggaagagtccttcctggtggaagaggataagaagcacgagcggcaccccatcttcggcaacatcgtggacgaggtggcctaccacgagaagtaccccaccatctaccacctgagaaagaaactggtggacagcaccgacaaggccgacctgcggctgatctatctggccctggcccacatgatcaagttccggggccacttcctgatcgagggcgacctgaaccccgacaacagcgacgtggacaagctgttcatccagctggtgcagacctacaaccagctgttcgaggaaaaccccatcaacgccagcggcgtggacgccaaggccatcctgtctgccagactgagcaagagcagacggctggaaaatctgatcgcccagctgcccggcgagaagaagaatggcctgttcggaaacctgattgccctgagcctgggcctgacccccaacttcaagagcaacttcgacctggccgaggatgccaaactgcagctgagcaaggacacctacgacgacgacctggacaacctgctggcccagatcggcgaccagtacgccgacctgtttctggccgccaagaacctgtccgacgccatcctgctgagcgacatcctgagagtgaacaccgagatcaccaaggcccccctgagcgcctctatgatcaagagatacgacgagcaccaccaggacctgaccctgctgaaagctctcgtgcggcagcagctgcctgagaagtacaaagagattttcttcgaccagagcaagaacggctacgccggctacattgacggcggagccagccaggaagagttctacaagttcatcaagcccatcctggaaaagatggacggcaccgaggaactgctcgtgaagctgaacagagaggacctgctgcggaagcagcggaccttcgacaacggcagcatcccccaccagatccacctgggagagctgcacgccattctgcggcggcaggaagatttttacccattcctgaaggacaaccgggaaaagatcgagaagatcctgaccttccgcatcccctactacgtgggccctctggccaggggaaacagcagattcgcctggatgaccagaaagagcgaggaaaccatcaccccctggaacttcgaggaagtggtggacaagggcgcttccgcccagagcttcatcgagcggatgaccaacttcgataagaacctgcccaacgagaaggtgctgcccaagcacagcctgctgtacgagtacttcaccgtgtataacgagctgaccaaagtgaaatacgtgaccgagggaatgagaaagcccgccttcctgagcggcgagcagaaaaaggccatcgtggacctgctgttcaagaccaaccggaaagtgaccgtgaagcagctgaaagaggactacttcaagaaaatcgagtgcttcgactccgtggaaatctccggcgtggaagatcggttcaacgcctccctgggcacataccacgatctgctgaaaattatcaaggacaaggacttcctggacaatgaggaaaacgaggacattctggaagatatcgtgctgaccctgacactgtttgaggacagagagatgatcgaggaacggctgaaaacctatgcccacctgttcgacgacaaagtgatgaagcagctgaagcggcggagatacaccggctggggcaggctgagccggaagctgatcaacggcatccgggacaagcagtccggcaagacaatcctggatttcctgaagtccgacggcttcgccaacagaaacttcatgcagctgatccacgacgacagcctgacctttaaagaggacatccagaaagcccaggtgtccggccagggcgatagcctgcacgagcacattgccaatctggccggcagccccgccattaagaagggcatcctgcagacagtgaaggtggtggacgagctcgtgaaagtgatgggccggcacaagcccgagaacatcgtgatcgaaatggccagagagaaccagaccacccagaagggacagaagaacagccgcgagagaatgaagcggatcgaagagggcatcaaagagctgggcagccagatcctgaaagaacaccccgtggaaaacacccagctgcagaacgagaagctgtacctgtactacctgcagaatgggcgggatatgtacgtggaccaggaactggacatcaaccggctgtccgactacgatgtggacgctatcgtgcctcagagctttctgaaggacgactccatcgacaacaaggtgctgaccagaagcgacaagaaccggggcaagagcgacaacgtgccctccgaagaggtcgtgaagaagatgaagaactactggcggcagctgctgaacgccaagctgattacccagagaaagttcgacaatctgaccaaggccgagagaggcggcctgagcgaactggataaggccggcttcatcaagagacagctggtggaaacccggcagatcacaaagcacgtggcacagatcctggactcccggatgaacactaagtacgacgagaatgacaagctgatccgggaagtgaaagtgatcaccctgaagtccaagctggtgtccgatttccggaaggatttccagttttacaaagtgcgcgagatcaacaactaccaccacgcccacgacgcctacctgaacgccgtcgtgggaaccgccctgatcaaaaagtaccctaagctggaaagcgagttcgtgtacggcgactacaaggtgtacgacgtgcggaagatgatcgccaagagcgagcaggaaatcggcaaggctaccgccaagtacttcttctacagcaacatcatgaactttttcaagaccgagattaccctggccaacggcgagatccggaagcggcctctgatcgagacaaacggcgaaaccggggagatcgtgtgggataagggccgggattttgccaccgtgcggaaagtgctgagcatgccccaagtgaatatcgtgaaaaagaccgaggtgcagacaggcggcttcagcaaagagtctatcctgcccaagaggaacagcgataagctgatcgccagaaagaaggactgggaccctaagaagtacggcggcttcgacagccccaccgtggcctattctgtgctggtggtggccaaagtggaaaagggcaagtccaagaaactgaagagtgtgaaagagctgctggggatcaccatcatggaaagaagcagcttcgagaagaatcccatcgactttctggaagccaagggctacaaagaagtgaaaaaggacctgatcatcaagctgcctaagtactccctgttcgagctggaaaacggccggaagagaatgctggcctctgccggcgaactgcagaagggaaacgaactggccctgccctccaaatatgtgaacttcctgtacctggccagccactatgagaagctgaagggctcccccgaggataatgagcagaaacagctgtttgtggaacagcacaagcactacctggacgagatcatcgagcagatcagcgagttctccaagagagtgatcctggccgacgctaatctggacaaagtgctgtccgcctacaacaagcaccgggataagcccatcagagagcaggccgagaatatcatccacctgtttaccctgaccaatctgggagcccctgccgccttcaagtactttgacaccaccatcgaccggaagaggtacaccagcaccaaagaggtgctggacgccaccctgatccaccagagcatcaccggcctgtacgagacacggatcgacctgtctcagctgggaggtgactccggcggctcttctggtggcagcagcggcggaagcagcggcggctctagcggcggcagcagcggcggctcctccggcggatctagcggcggcagcagcggaggcagcagcggcggaagcaccctgaacatcgaggacgagtacaggctgcacgagaccagcaaggagcccgacgtgagcctgggcagcacctggctgagcgatttccctcaggcttgggccgagaccggcggcatgggcctggccgtgcggcaggcccccctgattatccccctgaaggccaccagcacccccgtgagcatcaagcagtacccaatgtcccaggaggccaggctgggcatcaagcctcacatccagaggctgctggaccagggcatcctggtgccatgccagtccccctggaacacccctctgctgcccgtgaagaagcctggcaccaacgactaccggcccgtgcaggacctgagagaagtgaacaagcgggtggaggacatccacccaaccgtgcccaacccttacaacctgctgtccggcctgccccccagccaccagtggtacaccgtgctggacctgaaggacgccttcttctgcctgagactgcaccccacctctcagcccctgttcgccttcgagtggcgcgaccccgagatgggcatcagcggccagctgacctggaccagactgccacagggctttaagaatagcccaaccctgtttaacgaggccctgcacagggacctggccgacttcaggatccagcaccccgacctgattctgctgcagtacgtggacgacctgctgctggccgctaccagcgagctggactgccagcagggcaccagagccctgctgcagaccctgggcaacctgggctacagagccagcgccaagaaggcccagatctgtcagaagcaggtgaagtatctgggctacctgctgaaggaaggccagagatggctgaccgaggccagaaaggagactgtgatgggccagcccacccccaagacccccaggcagctgcgggagttcctgggcaaggccggcttttgcagactgtttatccctggcttcgccgagatggccgccccactgtaccctctgaccaagcctggcaccctgtttaactggggccccgaccagcagaaggcctaccaggagatcaagcaggccctgctgaccgcccccgccctgggcctgcccgacctgaccaagcctttcgagctgttcgtggacgagaagcagggatacgccaaaggcgtgctgacccagaagctgggcccctggcggaggcccgtggcctacctgagcaaaaaactggaccctgtggccgccggctggcccccatgcctgcggatggtggccgccatcgctgtgctgaccaaggacgccggcaagctgaccatgggccagcccctggtgatcctggcccctcacgccgtggaggctctggtgaagcagcctccagacaggtggctgtccaacgccaggatgacccactaccaggccctgctgctggacaccgaccgggtgcagttcggccctgtggtggccctgaaccccgccaccctgctgcctctgccagaggagggcctgcagcacaactgcctggacatcctggccgaggcccacggcaccaggcccgacctgaccgaccagcccctgcctgacgccgaccacacctggtacaccgacggcagctccctgctgcaggagggccagaggaaggccggcgccgccgtgaccaccgagaccgaggtgatctgggccaaagccctgcctgccggcacctccgcccagcgggccgagctgatcgccctgacccaggccctgaagatggctgagggcaagaagctgaacgtgtacaccgattccagatacgccttcgccaccgcccacatccacggcgagatctacagaagaaggggctggctgacctccgagggcaaggagatcaagaacaaggacgagattctggccctgctgaaggccctgttcctgcctaagagactgagcatcatccactgtcccggccaccagaagggccacagcgccgaggccagaggcaatagaatggccgaccaggccgccagaaaggccgccatcaccgagacccccgacaccagcaccctgctgatcgagaacagcagcccc

SEQ ID NO: 218 - protein, 1911 aa, synthetic construct
  REGION 1..1911: note = Description of Artificial Sequence: Synthetic polypeptide
DKKYSIGLDIGTNSVGWAVITDEYKVPSKKFKVLGNTDRHSIKKNLIGALLFDSGETAEATRLKRTARRRYTRRKNRICYLQEIFSNEMAKVDDSFFHRLEESFLVEEDKKHERHPIFGNIVDEVAYHEKYPTIYHLRKKLVDSTDKADLRLIYLALAHMIKFRGHFLIEGDLNPDNSDVDKLFIQLVQTYNQLFEENPINASGVDAKAILSARLSKSRRLENLIAQLPGEKKNGLFGNLIALSLGLTPNFKSNFDLAEDAKLQLSKDTYDDDLDNLLAQIGDQYADLFLAAKNLSDAILLSDILRVNTEITKAPLSASMIKRYDEHHQDLTLLKALVRQQLPEKYKEIFFDQSKNGYAGYIDGGASQEEFYKFIKPILEKMDGTEELLVKLNREDLLRKQRTFDNGSIPHQIHLGELHAILRRQEDFYPFLKDNREKIEKILTFRIPYYVGPLARGNSRFAWMTRKSEETITPWNFEEVVDKGASAQSFIERMTNFDKNLPNEKVLPKHSLLYEYFTVYNELTKVKYVTEGMRKPAFLSGEQKKAIVDLLFKTNRKVTVKQLKEDYFKKIECFDSVEISGVEDRFNASLGTYHDLLKIIKDKDFLDNEENEDILEDIVLTLTLFEDREMIEERLKTYAHLFDDKVMKQLKRRRYTGWGRLSRKLINGIRDKQSGKTILDFLKSDGFANRNFMQLIHDDSLTFKEDIQKAQVSGQGDSLHEHIANLAGSPAIKKGILQTVKVVDELVKVMGRHKPENIVIEMARENQTTQKGQKNSRERMKRIEEGIKELGSQILKEHPVENTQLQNEKLYLYYLQNGRDMYVDQELDINRLSDYDVDAIVPQSFLKDDSIDNKVLTRSDKNRGKSDNVPSEEVVKKMKNYWRQLLNAKLITQRKFDNLTKAERGGLSELDKAGFIKRQLVETRQITKHVAQILDSRMNTKYDENDKLIREVKVITLKSKLVSDFRKDFQFYKVREINNYHHAHDAYLNAVVGTALIKKYPKLESEFVYGDYKVYDVRKMIAKSEQEIGKATAKYFFYSNIMNFFKTEITLANGEIRKRPLIETNGETGEIVWDKGRDFATVRKVLSMPQVNIVKKTEVQTGGFSKESILPKRNSDKLIARKKDWDPKKYGGFDSPTVAYSVLVVAKVEKGKSKKLKSVKELLGITIMERSSFEKNPIDFLEAKGYKEVKKDLIIKLPKYSLFELENGRKRMLASAGELQKGNELALPSKYVNFLYLASHYEKLKGSPEDNEQKQLFVEQHKHYLDEIIEQISEFSKRVILADANLDKVLSAYNKHRDKPIREQAENIIHLFTLTNLGAPAAFKYFDTTIDRKRYTSTKEVLDATLIHQSITGLYETRIDLSQLGGDSGGSSGGSSGGSSGGSSGGSSGGSSGGSSGGSSGGSSGGSTLNIEDEYRLHETSKEPDVSLGSTWLSDFPQAWAETGGMGLAVRQAPLIIPLKATSTPVSIKQYPMSQEARLGIKPHIQRLLDQGILVPCQSPWNTPLLPVKKPGTNDYRPVQDLREVNKRVEDIHPTVPNPYNLLSGLPPSHQWYTVLDLKDAFFCLRLHPTSQPLFAFEWRDPEMGISGQLTWTRLPQGFKNSPTLFNEALHRDLADFRIQHPDLILLQYVDDLLLAATSELDCQQGTRALLQTLGNLGYRASAKKAQICQKQVKYLGYLLKEGQRWLTEARKETVMGQPTPKTPRQLREFLGKAGFCRLFIPGFAEMAAPLYPLTKPGTLFNWGPDQQKAYQEIKQALLTAPALGLPDLTKPFELFVDEKQGYAKGVLTQKLGPWRRPVAYLSKKLDPVAAGWPPCLRMVAAIAVLTKDAGKLTMGQPLVILAPHAVEALVKQPPDRWLSNARMTHYQALLLDTDRVQFGPVVALNPATLLPLPEEGLQHNCLDILAEAHG

SEQ ID NO: 219 - DNA, 5733 bp, synthetic construct
  misc_feature 1..5733: note = Description of Artificial Sequence: Synthetic polynucleotide
  source 1..5733: mol_type = other DNA
gacaagaagtacagcatcggcctggacatcggcaccaactctgtgggctgggccgtgatcaccgacgagtacaaggtgcccagcaagaaattcaaggtgctgggcaacaccgaccggcacagcatcaagaagaacctgatcggagccctgctgttcgacagcggcgaaacagccgaggccacccggctgaagagaaccgccagaagaagatacaccagacggaagaaccggatctgctatctgcaagagatcttcagcaacgagatggccaaggtggacgacagcttcttccacagactggaagagtccttcctggtggaagaggataagaagcacgagcggcaccccatcttcggcaacatcgtggacgaggtggcctaccacgagaagtaccccaccatctaccacctgagaaagaaactggtggacagcaccgacaaggccgacctgcggctgatctatctggccctggcccacatgatcaagttccggggccacttcctgatcgagggcgacctgaaccccgacaacagcgacgtggacaagctgttcatccagctggtgcagacctacaaccagctgttcgaggaaaaccccatcaacgccagcggcgtggacgccaaggccatcctgtctgccagactgagcaagagcagacggctggaaaatctgatcgcccagctgcccggcgagaagaagaatggcctgttcggaaacctgattgccctgagcctgggcctgacccccaacttcaagagcaacttcgacctggccgaggatgccaaactgcagctgagcaaggacacctacgacgacgacctggacaacctgctggcccagatcggcgaccagtacgccgacctgtttctggccgccaagaacctgtccgacgccatcctgctgagcgacatcctgagagtgaacaccgagatcaccaaggcccccctgagcgcctctatgatcaagagatacgacgagcaccaccaggacctgaccctgctgaaagctctcgtgcggcagcagctgcctgagaagtacaaagagattttcttcgaccagagcaagaacggctacgccggctacattgacggcggagccagccaggaagagttctacaagttcatcaagcccatcctggaaaagatggacggcaccgaggaactgctcgtgaagctgaacagagaggacctgctgcggaagcagcggaccttcgacaacggcagcatcccccaccagatccacctgggagagctgcacgccattctgcggcggcaggaagatttttacccattcctgaaggacaaccgggaaaagatcgagaagatcctgaccttccgcatcccctactacgtgggccctctggccaggggaaacagcagattcgcctggatgaccagaaagagcgaggaaaccatcaccccctggaacttcgaggaagtggtggacaagggcgcttccgcccagagcttcatcgagcggatgaccaacttcgataagaacctgcccaacgagaaggtgctgcccaagcacagcctgctgtacgagtacttcaccgtgtataacgagctgaccaaagtgaaatacgtgaccgagggaatgagaaagcccgccttcctgagcggcgagcagaaaaaggccatcgtggacctgctgttcaagaccaaccggaaagtgaccgtgaagcagctgaaagaggactacttcaagaaaatcgagtgcttcgactccgtggaaatctccggcgtggaagatcggttcaacgcctccctgggcacataccacgatctgctgaaaattatcaaggacaaggacttcctggacaatgaggaaaacgaggacattctggaagatatcgtgctgaccctgacactgtttgaggacagagagatgatcgaggaacggctgaaaacctatgcccacctgttcgacgacaaagtgatgaagcagctgaagcggcggagatacaccggctggggcaggctgagccggaagctgatcaacggcatccgggacaagcagtccggcaagacaatcctggatttcctgaagtccgacggcttcgccaacagaaacttcatgcagctgatccacgacgacagcctgacctttaaagaggacatccagaaagcccaggtgtccggccagggcgatagcctgcacgagcacattgccaatctggccggcagccccgccattaagaagggcatcctgcagacagtgaaggtggtggacgagctcgtgaaagtgatgggccggcacaagcccgagaacatcgtgatcgaaatggccagagagaaccagaccacccagaagggacagaagaacagccgcgagagaatgaagcggatcgaagagggcatcaaagagctgggcagccagatcctgaaagaacaccccgtggaaaacacccagctgcagaacgagaagctgtacctgtactacctgcagaatgggcgggatatgtacgtggaccaggaactggacatcaaccggctgtccgactacgatgtggacgctatcgtgcctcagagctttctgaaggacgactccatcgacaacaaggtgctgaccagaagcgacaagaaccggggcaagagcgacaacgtgccctccgaagaggtcgtgaagaagatgaagaactactggcggcagctgctgaacgccaagctgattacccagagaaagttcgacaatctgaccaaggccgagagaggcggcctgagcgaactggataaggccggcttcatcaagagacagctggtggaaacccggcagatcacaaagcacgtggcacagatcctggactcccggatgaacactaagtacgacgagaatgacaagctgatccgggaagtgaaagtgatcaccctgaagtccaagctggtgtccgatttccggaaggatttccagttttacaaagtgcgcgagatcaacaactaccaccacgcccacgacgcctacctgaacgccgtcgtgggaaccgccctgatcaaaaagtaccctaagctggaaagcgagttcgtgtacggcgactacaaggtgtacgacgtgcggaagatgatcgccaagagcgagcaggaaatcggcaaggctaccgccaagtacttcttctacagcaacatcatgaactttttcaagaccgagattaccctggccaacggcgagatccggaagcggcctctgatcgagacaaacggcgaaaccggggagatcgtgtgggataagggccgggattttgccaccgtgcggaaagtgctgagcatgccccaagtgaatatcgtgaaaaagaccgaggtgcagacaggcggcttcagcaaagagtctatcctgcccaagaggaacagcgataagctgatcgccagaaagaaggactgggaccctaagaagtacggcggcttcgacagccccaccgtggcctattctgtgctggtggtggccaaagtggaaaagggcaagtccaagaaactgaagagtgtgaaagagctgctggggatcaccatcatggaaagaagcagcttcgagaagaatcccatcgactttctggaagccaagggctacaaagaagtgaaaaaggacctgatcatcaagctgcctaagtactccctgttcgagctggaaaacggccggaagagaatgctggcctctgccggcgaactgcagaagggaaacgaactggccctgccctccaaatatgtgaacttcctgtacctggccagccactatgagaagctgaagggctcccccgaggataatgagcagaaacagctgtttgtggaacagcacaagcactacctggacgagatcatcgagcagatcagcgagttctccaagagagtgatcctggccgacgctaatctggacaaagtgctgtccgcctacaacaagcaccgggataagcccatcagagagcaggccgagaatatcatccacctgtttaccctgaccaatctgggagcccctgccgccttcaagtactttgacaccaccatcgaccggaagaggtacaccagcaccaaagaggtgctggacgccaccctgatccaccagagcatcaccggcctgtacgagacacggatcgacctgtctcagctgggaggtgactccggcggctcttctggtggcagcagcggcggaagcagcggcggctctagcggcggcagcagcggcggctcctccggcggatctagcggcggcagcagcggaggcagcagcggcggaagcaccctgaacatcgaggacgagtacaggctgcacgagaccagcaaggagcccgacgtgagcctgggcagcacctggctgagcgatttccctcaggcttgggccgagaccggcggcatgggcctggccgtgcggcaggcccccctgattatccccctgaaggccaccagcacccccgtgagcatcaagcagtacccaatgtcccaggaggccaggctgggcatcaagcctcacatccagaggctgctggaccagggcatcctggtgccatgccagtccccctggaacacccctctgctgcccgtgaagaagcctggcaccaacgactaccggcccgtgcaggacctgagagaagtgaacaagcgggtggaggacatccacccaaccgtgcccaacccttacaacctgctgtccggcctgccccccagccaccagtggtacaccgtgctggacctgaaggacgccttcttctgcctgagactgcaccccacctctcagcccctgttcgccttcgagtggcgcgaccccgagatgggcatcagcggccagctgacctggaccagactgccacagggctttaagaatagcccaaccctgtttaacgaggccctgcacagggacctggccgacttcaggatccagcaccccgacctgattctgctgcagtacgtggacgacctgctgctggccgctaccagcgagctggactgccagcagggcaccagagccctgctgcagaccctgggcaacctgggctacagagccagcgccaagaaggcccagatctgtcagaagcaggtgaagtatctgggctacctgctgaaggaaggccagagatggctgaccgaggccagaaaggagactgtgatgggccagcccacccccaagacccccaggcagctgcgggagttcctgggcaaggccggcttttgcagactgtttatccctggcttcgccgagatggccgccccactgtaccctctgaccaagcctggcaccctgtttaactggggccccgaccagcagaaggcctaccaggagatcaagcaggccctgctgaccgcccccgccctgggcctgcccgacctgaccaagcctttcgagctgttcgtggacgagaagcagggatacgccaaaggcgtgctgacccagaagctgggcccctggcggaggcccgtggcctacctgagcaaaaaactggaccctgtggccgccggctggcccccatgcctgcggatggtggccgccatcgctgtgctgaccaaggacgccggcaagctgaccatgggccagcccctggtgatcctggcccctcacgccgtggaggctctggtgaagcagcctccagacaggtggctgtccaacgccaggatgacccactaccaggccctgctgctggacaccgaccgggtgcagttcggccctgtggtggccctgaaccccgccaccctgctgcctctgccagaggagggcctgcagcacaactgcctggacatcctggccgaggcccacggc

SEQ ID NO: 220 - RNA, 5733 nt, synthetic construct
  misc_feature 1..5733: note = Description of Artificial Sequence: Synthetic polynucleotide
  source 1..5733: mol_type = other RNA
gacaagaagtacagcatcggcctggacatcggcaccaactctgtgggctgggccgtgatcaccgacgagtacaaggtgcccagcaagaaattcaaggtgctgggcaacaccgaccggcacagcatcaagaagaacctgatcggagccctgctgttcgacagcggcgaaacagccgaggccacccggctgaagagaaccgccagaagaagatacaccagacggaagaaccggatctgctatctgcaagagatcttcagcaacgagatggccaaggtggacgacagcttcttccacagactggaagagtccttcctggtggaagaggataagaagcacgagcggcaccccatcttcggcaacatcgtggacgaggtggcctaccacgagaagtaccccaccatctaccacctgagaaagaaactggtggacagcaccgacaaggccgacctgcggctgatctatctggccctggcccacatgatcaagttccggggccacttcctgatcgagggcgacctgaaccccgacaacagcgacgtggacaagctgttcatccagctggtgcagacctacaaccagctgttcgaggaaaaccccatcaacgccagcggcgtggacgccaaggccatcctgtctgccagactgagcaagagcagacggctggaaaatctgatcgcccagctgcccggcgagaagaagaatggcctgttcggaaacctgattgccctgagcctgggcctgacccccaacttcaagagcaacttcgacctggccgaggatgccaaactgcagctgagcaaggacacctacgacgacgacctggacaacctgctggcccagatcggcgaccagtacgccgacctgtttctggccgccaagaacctgtccgacgccatcctgctgagcgacatcctgagagtgaacaccgagatcaccaaggcccccctgagcgcctctatgatcaagagatacgacgagcaccaccaggacctgaccctgctgaaagctctcgtgcggcagcagctgcctgagaagtacaaagagattttcttcgaccagagcaagaacggctacgccggctacattgacggcggagccagccaggaagagttctacaagttcatcaagcccatcctggaaaagatggacggcaccgaggaactgctcgtgaagctgaacagagaggacctgctgcggaagcagcggaccttcgacaacggcagcatcccccaccagatccacctgggagagctgcacgccattctgcggcggcaggaagatttttacccattcctgaaggacaaccgggaaaagatcgagaagatcctgaccttccgcatcccctactacgtgggccctctggccaggggaaacagcagattcgcctggatgaccagaaagagcgaggaaaccatcaccccctggaacttcgaggaagtggtggacaagggcgcttccgcccagagcttcatcgagcggatgaccaacttcgataagaacctgcccaacgagaaggtgctgcccaagcacagcctgctgtacgagtacttcaccgtgtataacgagctgaccaaagtgaaatacgtgaccgagggaatgagaaagcccgccttcctgagcggcgagcagaaaaaggccatcgtggacctgctgttcaagaccaaccggaaagtgaccgtgaagcagctgaaagaggactacttcaagaaaatcgagtgcttcgactccgtggaaatctccggcgtggaagatcggttcaacgcctccctgggcacataccacgatctgctgaaaattatcaaggacaaggacttcctggacaatgaggaaaacgaggacattctggaagatatcgtgctgaccctgacactgtttgaggacagagagatgatcgaggaacggctgaaaacctatgcccacctgttcgacgacaaagtgatgaagcagctgaagcggcggagatacaccggctggggcaggctgagccggaagctgatcaacggcatccgggacaagcagtccggcaagacaatcctggatttcctgaagtccgacggcttcgccaacagaaacttcatgcagctgatccacgacgacagcctgacctttaaagaggacatccagaaagcccaggtgtccggccagggcgatagcctgcacgagcacattgccaatctggccggcagccccgccattaagaagggcatcctgcagacagtgaaggtggtggacgagctcgtgaaagtgatgggccggcacaagcccgagaacatcgtgatcgaaatggccagagagaaccagaccacccagaagggacagaagaacagccgcgagagaatgaagcggatcgaagagggcatcaaagagctgggcagccagatcctgaaagaacaccccgtggaaaacacccagctgcagaacgagaagctgtacctgtactacctgcagaatgggcgggatatgtacgtggaccaggaactggacatcaaccggctgtccgactacgatgtggacgctatcgtgcctcagagctttctgaaggacgactccatcgacaacaaggtgctgaccagaagcgacaagaaccggggcaagagcgacaacgtgccctccgaagaggtcgtgaagaagatgaagaactactggcggcagctgctgaacgccaagctgattacccagagaaagttcgacaatctgaccaaggccgagagaggcggcctgagcgaactggataaggccggcttcatcaagagacagctggtggaaacccggcagatcacaaagcacgtggcacagatcctggactcccggatgaacactaagtacgacgagaatgacaagctgatccgggaagtgaaagtgatcaccctgaagtccaagctggtgtccgatttccggaaggatttccagttttacaaagtgcgcgagatcaacaactaccaccacgcccacgacgcctacctgaacgccgtcgtgggaaccgccctgatcaaaaagtaccctaagctggaaagcgagttcgtgtacggcgactacaaggtgtacgacgtgcggaagatgatcgccaagagcgagcaggaaatcggcaaggctaccgccaagtacttcttctacagcaacatcatgaactttttcaagaccgagattaccctggccaacggcgagatccggaagcggcctctgatcgagacaaacggcgaaaccggggagatcgtgtgggataagggccgggattttgccaccgtgcggaaagtgctgagcatgccccaagtgaatatcgtgaaaaagaccgaggtgcagacaggcggcttcagcaaagagtctatcctgcccaagaggaacagcgataagctgatcgccagaaagaaggactgggaccctaagaagtacggcggcttcgacagccccaccgtggcctattctgtgctggtggtggccaaagtggaaaagggcaagtccaagaaactgaagagtgtgaaagagctgctggggatcaccatcatggaaagaagcagcttcgagaagaatcccatcgactttctggaagccaagggctacaaagaagtgaaaaaggacctgatcatcaagctgcctaagtactccctgttcgagctggaaaacggccggaagagaatgctggcctctgccggcgaactgcagaagggaaacgaactggccctgccctccaaatatgtgaacttcctgtacctggccagccactatgagaagctgaagggctcccccgaggataatgagcagaaacagctgtttgtggaacagcacaagcactacctggacgagatcatcgagcagatcagcgagttctccaagagagtgatcctggccgacgctaatctggacaaagtgctgtccgcctacaacaagcaccgggataagcccatcagagagcaggccgagaatatcatccacctgtttaccctgaccaatctgggagcccctgccgccttcaagtactttgacaccaccatcgaccggaagaggtacaccagcaccaaagaggtgctggacgccaccctgatccaccagagcatcaccggcctgtacgagacacggatcgacctgtctcagctgggaggtgactccggcggctcttctggtggcagcagcggcggaagcagcggcggctctagcggcggcagcagcggcggctcctccggcggatctagcggcggcagcagcggaggcagcagcggcggaagcaccctgaacatcgaggacgagtacaggctgcacgagaccagcaaggagcccgacgtgagcctgggcagcacctggctgagcgatttccctcaggcttgggccgagaccggcggcatgggcctggccgtgcggcaggcccccctgattatccccctgaaggccaccagcacccccgtgagcatcaagcagtacccaatgtcccaggaggccaggctgggcatcaagcctcacatccagaggctgctggaccagggcatcctggtgccatgccagtccccctggaacacccctctgctgcccgtgaagaagcctggcaccaacgactaccggcccgtgcaggacctgagagaagtgaacaagcgggtggaggacatccacccaaccgtgcccaacccttacaacctgctgtccggcctgccccccagccaccagtggtacaccgtgctggacctgaaggacgccttcttctgcctgagactgcaccccacctctcagcccctgttcgccttcgagtggcgcgaccccgagatgggcatcagcggccagctgacctggaccagactgccacagggctttaagaatagcccaaccctgtttaacgaggccctgcacagggacctggccgacttcaggatccagcaccccgacctgattctgctgcagtacgtggacgacctgctgctggccgctaccagcgagctggactgccagcagggcaccagagccctgctgcagaccctgggcaacctgggctacagagccagcgccaagaaggcccagatctgtcagaagcaggtgaagtatctgggctacctgctgaaggaaggccagagatggctgaccgaggccagaaaggagactgtgatgggccagcccacccccaagacccccaggcagctgcgggagttcctgggcaaggccggcttttgcagactgtttatccctggcttcgccgagatggccgccccactgtaccctctgaccaagcctggcaccctgtttaactggggccccgaccagcagaaggcctaccaggagatcaagcaggccctgctgaccgcccccgccctgggcctgcccgacctgaccaagcctttcgagctgttcgtggacgagaagcagggatacgccaaaggcgtgctgacccagaagctgggcccctggcggaggcccgtggcctacctgagcaaaaaactggaccctgtggccgccggctggcccccatgcctgcggatggtggccgccatcgctgtgctgaccaaggacgccggcaagctgaccatgggccagcccctggtgatcctggcccctcacgccgtggaggctctggtgaagcagcctccagacaggtggctgtccaacgccaggatgacccactaccaggccctgctgctggacaccgaccgggtgcagttcggccctgtggtggccctgaaccccgccaccctgctgcctctgccagaggagggcctgcagcacaactgcctggacatcctggccgaggcccacggc

SEQ ID NO: 221 - protein, 2084 aa, synthetic construct
  REGION 1..2084: note = Description of Artificial Sequence: Synthetic polypeptide
DKKYSIGLDIGTNSVGWAVITDEYKVPSKKFKVLGNTDRHSIKKNLIGALLFDSGETAEATRLKRTARRRYTRRKNRICYLQEIFSNEMAKVDDSFFHRLEESFLVEEDKKHERHPIFGNIVDEVAYHEKYPTIYHLRKKLVDSTDKADLRLIYLALAHMIKFRGHFLIEGDLNPDNSDVDKLFIQLVQTYNQLFEENPINASGVDAKAILSARLSKSRRLENLIAQLPGEKKNGLFGNLIALSLGLTPNFKSNFDLAEDAKLQLSKDTYDDDLDNLLAQIGDQYADLFLAAKNLSDAILLSDILRVNTEITKAPLSASMIKRYDEHHQDLTLLKALVRQQLPEKYKEIFFDQSKNGYAGYIDGGASQEEFYKFIKPILEKMDGTEELLVKLNREDLLRKQRTFDNGSIPHQIHLGELHAILRRQEDFYPFLKDNREKIEKILTFRIPYYVGPLARGNSRFAWMTRKSEETITPWNFEEVVDKGASAQSFIERMTNFDKNLPNEKVLPKHSLLYEYFTVYNELTKVKYVTEGMRKPAFLSGEQKKAIVDLLFKTNRKVTVKQLKEDYFKKIECFDSVEISGVEDRFNASLGTYHDLLKIIKDKDFLDNEENEDILEDIVLTLTLFEDREMIEERLKTYAHLFDDKVMKQLKRRRYTGWGRLSRKLINGIRDKQSGKTILDFLKSDGFANRNFMQLIHDDSLTFKEDIQKAQVSGQGDSLHEHIANLAGSPAIKKGILQTVKVVDELVKVMGRHKPENIVIEMARENQTTQKGQKNSRERMKRIEEGIKELGSQILKEHPVENTQLQNEKLYLYYLQNGRDMYVDQELDINRLSDYDVDAIVPQSFLKDDSIDNKVLTRSDKNRGKSDNVPSEEVVKKMKNYWRQLLNAKLITQRKFDNLTKAERGGLSELDKAGFIKRQLVETRQITKHVAQILDSRMNTKYDENDKLIREVKVITLKSKLVSDFRKDFQFYKVREINNYHHAHDAYLNAVVGTALIKKYPKLESEFVYGDYKVYDVRKMIAKSEQEIGKATAKYFFYSNIMNFFKTEITLANGEIRKRPLIETNGETGEIVWDKGRDFATVRKVLSMPQVNIVKKTEVQTGGFSKESILPKRNSDKLIARKKDWDPKKYGGFDSPTVAYSVLVVAKVEKGKSKKLKSVKELLGITIMERSSFEKNPIDFLEAKGYKEVKKDLIIKLPKYSLFELENGRKRMLASAGELQKGNELALPSKYVNFLYLASHYEKLKGSPEDNEQKQLFVEQHKHYLDEIIEQISEFSKRVILADANLDKVLSAYNKHRDKPIREQAENIIHLFTLTNLGAPAAFKYFDTTIDRKRYTSTKEVLDATLIHQSITGLYETRIDLSQLGGDSGGSSGSETPGTSESATPESSGSETPGTSESATPESSGGSTLNIEDEYRLHETSKEPDVSLGSTWLSDFPQAWAETGGMGLAVRQAPLIIPLKATSTPVSIKQYPMSQEARLGIKPHIQRLLDQGILVPCQSPWNTPLLPVKKPGTNDYRPVQDLREVNKRVEDIHPTVPNPYNLLSGLPPSHQWYTVLDLKDAFFCLRLHPTSQPLFAFEWRDPEMGISGQLTWTRLPQGFKNSPTLFNEALHRDLADFRIQHPDLILLQYVDDLLLAATSELDCQQGTRALLQTLGNLGYRASAKKAQICQKQVKYLGYLLKEGQRWLTEARKETVMGQPTPKTPRQLREFLGKAGFCRLFIPGFAEMAAPLYPLTKPGTLFNWGPDQQKAYQEIKQALLTAPALGLPDLTKPFELFVDEKQGYAKGVLTQKLGPWRRPVAYLSKKLDPVAAGWPPCLRMVAAIAVLTKDAGKLTMGQPLVILAPHAVEALVKQPPDRWLSNARMTHYQALLLDTDRVQFGPVVALNPATLLPLPEEGLQHNCLDILAEAHGTRPDLTDQPLPDADHTWYTDGSSLLQEGQRKAGAAVTTETEVIWAKALPAGTSAQRAELIALTQALKMAEGKKLNVYTDSRYAFATAHIHGEIYRRRGWLTSEGKEIKNKDEILALLKALFLPKRLSIIHCPGHQKGHSAEARGNRMADQAARKAAITETPDTSTLLIENSSP

SEQ ID NO: 222 - DNA, 6252 bp, synthetic construct
  misc_feature 1..6252: note = Description of Artificial Sequence: Synthetic polynucleotide
  source 1..6252: mol_type = other DNA
gacaagaagtacagcatcggcctggacatcggcaccaactctgtgggctgggccgtgatcaccgacgagtacaaggtgcccagcaagaaattcaaggtgctgggcaacaccgaccggcacagcatcaagaagaacctgatcggagccctgctgttcgacagcggcgaaacagccgaggccacccggctgaagagaaccgccagaagaagatacaccagacggaagaaccggatctgctatctgcaagagatcttcagcaacgagatggccaaggtggacgacagcttcttccacagactggaagagtccttcctggtggaagaggataagaagcacgagcggcaccccatcttcggcaacatcgtggacgaggtggcctaccacgagaagtaccccaccatctaccacctgagaaagaaactggtggacagcaccgacaaggccgacctgcggctgatctatctggccctggcccacatgatcaagttccggggccacttcctgatcgagggcgacctgaaccccgacaacagcgacgtggacaagctgttcatccagctggtgcagacctacaaccagctgttcgaggaaaaccccatcaacgccagcggcgtggacgccaaggccatcctgtctgccagactgagcaagagcagacggctggaaaatctgatcgcccagctgcccggcgagaagaagaatggcctgttcggaaacctgattgccctgagcctgggcctgacccccaacttcaagagcaacttcgacctggccgaggatgccaaactgcagctgagcaaggacacctacgacgacgacctggacaacctgctggcccagatcggcgaccagtacgccgacctgtttctggccgccaagaacctgtccgacgccatcctgctgagcgacatcctgagagtgaacaccgagatcaccaaggcccccctgagcgcctctatgatcaagagatacgacgagcaccaccaggacctgaccctgctgaaagctctcgtgcggcagcagctgcctgagaagtacaaagagattttcttcgaccagagcaagaacggctacgccggctacattgacggcggagccagccaggaagagttctacaagttcatcaagcccatcctggaaaagatggacggcaccgaggaactgctcgtgaagctgaacagagaggacctgctgcggaagcagcggaccttcgacaacggcagcatcccccaccagatccacctgggagagctgcacgccattctgcggcggcaggaagatttttacccattcctgaaggacaaccgggaaaagatcgagaagatcctgaccttccgcatcccctactacgtgggccctctggccaggggaaacagcagattcgcctggatgaccagaaagagcgaggaaaccatcaccccctggaacttcgaggaagtggtggacaagggcgcttccgcccagagcttcatcgagcggatgaccaacttcgataagaacctgcccaacgagaaggtgctgcccaagcacagcctgctgtacgagtacttcaccgtgtataacgagctgaccaaagtgaaatacgtgaccgagggaatgagaaagcccgccttcctgagcggcgagcagaaaaaggccatcgtggacctgctgttcaagaccaaccggaaagtgaccgtgaagcagctgaaagaggactacttcaagaaaatcgagtgcttcgactccgtggaaatctccggcgtggaagatcggttcaacgcctccctgggcacataccacgatctgctgaaaattatcaaggacaaggacttcctggacaatgaggaaaacgaggacattctggaagatatcgtgctgaccctgacactgtttgaggacagagagatgatcgaggaacggctgaaaacctatgcccacctgttcgacgacaaagtgatgaagcagctgaagcggcggagatacaccggctggggcaggctgagccggaagctgatcaacggcatccgggacaagcagtccggcaagacaatcctggatttcctgaagtccgacggcttcgccaacagaaacttcatgcagctgatccacgacgacagcctgacctttaaagaggacatccagaaagcccaggtgtccggccagggcgatagcctgcacgagcacattgccaatctggccggcagccccgccattaagaagggcatcctgcagacagtgaaggtggtggacgagctcgtgaaagtgatgggccggcacaagcccgagaacatcgtgatcgaaatggccagagagaaccagaccacccagaagggacagaagaacagccgcgagagaatgaagcggatcgaagagggcatcaaagagctgggcagccagatcctgaaagaacaccccgtggaaaacacccagctgcagaacgagaagctgtacctgtactacctgcagaatgggcgggatatgtacgtggaccaggaactggacatcaaccggctgtccgactacgatgtggacgctatcgtgcctcagagctttctgaaggacgactccatcgacaacaaggtgctgaccagaagcgacaagaaccggggcaagagcgacaacgtgccctccgaagaggtcgtgaagaagatgaagaactactggcggcagctgctgaacgccaagctgattacccagagaaagttcgacaatctgaccaaggccgagagaggcggcctgagcgaactggataaggccggcttcatcaagagacagctggtggaaacccggcagatcacaaagcacgtggcacagatcctggactcccggatgaacactaagtacgacgagaatgacaagctgatccgggaagtgaaagtgatcaccctgaagtccaagctggtgtccgatttccggaaggatttccagttttacaaagtgcgcgagatcaacaactaccaccacgcccacgacgcctacctgaacgccgtcgtgggaaccgccctgatcaaaaagtaccctaagctggaaagcgagttcgtgtacggcgactacaaggtgtacgacgtgcggaagatgatcgccaagagcgagcaggaaatcggcaaggctaccgccaagtacttcttctacagcaacatcatgaactttttcaagaccgagattaccctggccaacggcgagatccggaagcggcctctgatcgagacaaacggcgaaaccggggagatcgtgtgggataagggccgggattttgccaccgtgcggaaagtgctgagcatgccccaagtgaatatcgtgaaaaagaccgaggtgcagacaggcggcttcagcaaagagtctatcctgcccaagaggaacagcgataagctgatcgccagaaagaaggactgggaccctaagaagtacggcggcttcgacagccccaccgtggcctattctgtgctggtggtggccaaagtggaaaagggcaagtccaagaaactgaagagtgtgaaagagctgctggggatcaccatcatggaaagaagcagcttcgagaagaatcccatcgactttctggaagccaagggctacaaagaagtgaaaaaggacctgatcatcaagctgcctaagtactccctgttcgagctggaaaacggccggaagagaatgctggcctctgccggcgaactgcagaagggaaacgaactggccctgccctccaaatatgtgaacttcctgtacctggccagccactatgagaagctgaagggctcccccgaggataatgagcagaaacagctgtttgtggaacagcacaagcactacctggacgagatcatcgagcagatcagcgagttctccaagagagtgatcctggccgacgctaatctggacaaagtgctgtccgcctacaacaagcaccgggataagcccatcagagagcaggccgagaatatcatccacctgtttaccctgaccaatctgggagcccctgccgccttcaagtactttgacaccaccatcgaccggaagaggtacaccagcaccaaagaggtgctggacgccaccctgatccaccagagcatcaccggcctgtacgagacacggatcgacctgtctcagctgggaggtgactccggcggaagcagcggatctgaaacccctggcaccagcgaatctgccacccctgagtccagcggcagcgagacaccaggcaccagcgagagcgccacacccgagagcagcggcggctctaccctgaacatcgaggacgagtacaggctgcacgagaccagcaaggagcccgacgtgagcctgggcagcacctggctgagcgatttccctcaggcttgggccgagaccggcggcatgggcctggccgtgcggcaggcccccctgattatccccctgaaggccaccagcacccccgtgagcatcaagcagtacccaatgtcccaggaggccaggctgggcatcaagcctcacatccagaggctgctggaccagggcatcctggtgccatgccagtccccctggaacacccctctgctgcccgtgaagaagcctggcaccaacgactaccggcccgtgcaggacctgagagaagtgaacaagcgggtggaggacatccacccaaccgtgcccaacccttacaacctgctgtccggcctgccccccagccaccagtggtacaccgtgctggacctgaaggacgccttcttctgcctgagactgcaccccacctctcagcccctgttcgccttcgagtggcgcgaccccgagatgggcatcagcggccagctgacctggaccagactgccacagggctttaagaatagcccaaccctgtttaacgaggccctgcacagggacctggccgacttcaggatccagcaccccgacctgattctgctgcagtacgtggacgacctgctgctggccgctaccagcgagctggactgccagcagggcaccagagccctgctgcagaccctgggcaacctgggctacagagccagcgccaagaaggcccagatctgtcagaagcaggtgaagtatctgggctacctgctgaaggaaggccagagatggctgaccgaggccagaaaggagactgtgatgggccagcccacccccaagacccccaggcagctgcgggagttcctgggcaaggccggcttttgcagactgtttatccctggcttcgccgagatggccgccccactgtaccctctgaccaagcctggcaccctgtttaactggggccccgaccagcagaaggcctaccaggagatcaagcaggccctgctgaccgcccccgccctgggcctgcccgacctgaccaagcctttcgagctgttcgtggacgagaagcagggatacgccaaaggcgtgctgacccagaagctgggcccctggcggaggcccgtggcctacctgagcaaaaaactggaccctgtggccgccggctggcccccatgcctgcggatggtggccgccatcgctgtgctgaccaaggacgccggcaagctgaccatgggccagcccctggtgatcctggcccctcacgccgtggaggctctggtgaagcagcctccagacaggtggctgtccaacgccaggatgacccactaccaggccctgctgctggacaccgaccgggtgcagttcggccctgtggtggccctgaaccccgccaccctgctgcctctgccagaggagggcctgcagcacaactgcctggacatcctggccgaggcccacggcaccaggcccgacctgaccgaccagcccctgcctgacgccgaccacacctggtacaccgacggcagctccctgctgcaggagggccagaggaaggccggcgccgccgtgaccaccgagaccgaggtgatctgggccaaagccctgcctgccggcacctccgcccagcgggccgagctgatcgccctgacccaggccctgaagatggctgagggcaagaagctgaacgtgtacaccgattccagatacgccttcgccaccgcccacatccacggcgagatctacagaagaaggggctggctgacctccgagggcaaggagatcaagaacaaggacgagattctggccctgctgaaggccctgttcctgcctaagagactgagcatcatccactgtcccggccaccagaagggccacagcgccgaggccagaggcaatagaatggccgaccaggccgccagaaaggccgccatcaccgagacccccgacaccagcaccctgctgatcgagaacagcagcccc

SEQ ID NO: 223 - skipped

SEQ ID NO: 224 - protein, 1911 aa, synthetic construct
  REGION 1..1911: note = Description of Artificial Sequence: Synthetic polypeptide
DKKYSIGLDIGTNSVGWAVITDEYKVPSKKFKVLGNTDRHSIKKNLIGALLFDSGETAEATRLKRTARRRYTRRKNRICYLQEIFSNEMAKVDDSFFHRLEESFLVEEDKKHERHPIFGNIVDEVAYHEKYPTIYHLRKKLVDSTDKADLRLIYLALAHMIKFRGHFLIEGDLNPDNSDVDKLFIQLVQTYNQLFEENPINASGVDAKAILSARLSKSRRLENLIAQLPGEKKNGLFGNLIALSLGLTPNFKSNFDLAEDAKLQLSKDTYDDDLDNLLAQIGDQYADLFLAAKNLSDAILLSDILRVNTEITKAPLSASMIKRYDEHHQDLTLLKALVRQQLPEKYKEIFFDQSKNGYAGYIDGGASQEEFYKFIKPILEKMDGTEELLVKLNREDLLRKQRTFDNGSIPHQIHLGELHAILRRQEDFYPFLKDNREKIEKILTFRIPYYVGPLARGNSRFAWMTRKSEETITPWNFEEVVDKGASAQSFIERMTNFDKNLPNEKVLPKHSLLYEYFTVYNELTKVKYVTEGMRKPAFLSGEQKKAIVDLLFKTNRKVTVKQLKEDYFKKIECFDSVEISGVEDRFNASLGTYHDLLKIIKDKDFLDNEENEDILEDIVLTLTLFEDREMIEERLKTYAHLFDDKVMKQLKRRRYTGWGRLSRKLINGIRDKQSGKTILDFLKSDGFANRNFMQLIHDDSLTFKEDIQKAQVSGQGDSLHEHIANLAGSPAIKKGILQTVKVVDELVKVMGRHKPENIVIEMARENQTTQKGQKNSRERMKRIEEGIKELGSQILKEHPVENTQLQNEKLYLYYLQNGRDMYVDQELDINRLSDYDVDAIVPQSFLKDDSIDNKVLTRSDKNRGKSDNVPSEEVVKKMKNYWRQLLNAKLITQRKFDNLTKAERGGLSELDKAGFIKRQLVETRQITKHVAQILDSRMNTKYDENDKLIREVKVITLKSKLVSDFRKDFQFYKVREINNYHHAHDAYLNAVVGTALIKKYPKLESEFVYGDYKVYDVRKMIAKSEQEIGKATAKYFFYSNIMNFFKTEITLANGEIRKRPLIETNGETGEIVWDKGRDFATVRKVLSMPQVNIVKKTEVQTGGFSKESILPKRNSDKLIARKKDWDPKKYGGFDSPTVAYSVLVVAKVEKGKSKKLKSVKELLGITIMERSSFEKNPIDFLEAKGYKEVKKDLIIKLPKYSLFELENGRKRMLASAGELQKGNELALPSKYVNFLYLASHYEKLKGSPEDNEQKQLFVEQHKHYLDEIIEQISEFSKRVILADANLDKVLSAYNKHRDKPIREQAENIIHLFTLTNLGAPAAFKYFDTTIDRKRYTSTKEVLDATLIHQSITGLYETRIDLSQLGGDSGGSSGSETPGTSESATPESSGSETPGTSESATPESSGGSTLNIEDEYRLHETSKEPDVSLGSTWLSDFPQAWAETGGMGLAVRQAPLIIPLKATSTPVSIKQYPMSQEARLGIKPHIQRLLDQGILVPCQSPWNTPLLPVKKPGTNDYRPVQDLREVNKRVEDIHPTVPNPYNLLSGLPPSHQWYTVLDLKDAFFCLRLHPTSQPLFAFEWRDPEMGISGQLTWTRLPQGFKNSPTLFNEALHRDLADFRIQHPDLILLQYVDDLLLAATSELDCQQGTRALLQTLGNLGYRASAKKAQICQKQVKYLGYLLKEGQRWLTEARKETVMGQPTPKTPRQLREFLGKAGFCRLFIPGFAEMAAPLYPLTKPGTLFNWGPDQQKAYQEIKQALLTAPALGLPDLTKPFELFVDEKQGYAKGVLTQKLGPWRRPVAYLSKKLDPVAAGWPPCLRMVAAIAVLTKDAGKLTMGQPLVILAPHAVEALVKQPPDRWLSNARMTHYQALLLDTDRVQFGPVVALNPATLLPLPEEGLQHNCLDILAEAHG

SEQ ID NO: 225 - DNA, 5733 bp, synthetic construct
  misc_feature 1..5733: note = Description of Artificial Sequence: Synthetic polynucleotide
  source 1..5733: mol_type = other DNA
gacaagaagtacagcatcggcctggacatcggcaccaactctgtgggctgggccgtgatcaccgacgagtacaaggtgcccagcaagaaattcaaggtgctgggcaacaccgaccggcacagcatcaagaagaacctgatcggagccctgctgttcgacagcggcgaaacagccgaggccacccggctgaagagaaccgccagaagaagatacaccagacggaagaaccggatctgctatctgcaagagatcttcagcaacgagatggccaaggtggacgacagcttcttccacagactggaagagtccttcctggtggaagaggataagaagcacgagcggcaccccatcttcggcaacatcgtggacgaggtggcctaccacgagaagtaccccaccatctaccacctgagaaagaaactggtggacagcaccgacaaggccgacctgcggctgatctatctggccctggcccacatgatcaagttccggggccacttcctgatcgagggcgacctgaaccccgacaacagcgacgtggacaagctgttcatccagctggtgcagacctacaaccagctgttcgaggaaaaccccatcaacgccagcggcgtggacgccaaggccatcctgtctgccagactgagcaagagcagacggctggaaaatctgatcgcccagctgcccggcgagaagaagaatggcctgttcggaaacctgattgccctgagcctgggcctgacccccaacttcaagagcaacttcgacctggccgaggatgccaaactgcagctgagcaaggacacctacgacgacgacctggacaacctgctggcccagatcggcgaccagtacgccgacctgtttctggccgccaagaacctgtccgacgccatcctgctgagcgacatcctgagagtgaacaccgagatcaccaaggcccccctgagcgcctctatgatcaagagatacgacgagcaccaccaggacctgaccctgctgaaagctctcgtgcggcagcagctgcctgagaagtacaaagagattttcttcgaccagagcaagaacggctacgccggctacattgacggcggagccagccaggaagagttctacaagttcatcaagcccatcctggaaaagatggacggcaccgaggaactgctcgtgaagctgaacagagaggacctgctgcggaagcagcggaccttcgacaacggcagcatcccccaccagatccacctgggagagctgcacgccattctgcggcggcaggaagatttttacccattcctgaaggacaaccgggaaaagatcgagaagatcctgaccttccgcatcccctactacgtgggccctctggccaggggaaacagcagattcgcctggatgaccagaaagagcgaggaaaccatcaccccctggaacttcgaggaagtggtggacaagggcgcttccgcccagagcttcatcgagcggatgaccaacttcgataagaacctgcccaacgagaaggtgctgcccaagcacagcctgctgtacgagtacttcaccgtgtataacgagctgaccaaagtgaaatacgtgaccgagggaatgagaaagcccgccttcctgagcggcgagcagaaaaaggccatcgtggacctgctgttcaagaccaaccggaaagtgaccgtgaagcagctgaaagaggactacttcaagaaaatcgagtgcttcgactccgtggaaatctccggcgtggaagatcggttcaacgcctccctgggcacataccacgatctgctgaaaattatcaaggacaaggacttcctggacaatgaggaaaacgaggacattctggaagatatcgtgctgaccctgacactgtttgaggacagagagatgatcgaggaacggctgaaaacctatgcccacctgttcgacgacaaagtgatgaagcagctgaagcggcggagatacaccggctggggcaggctgagccggaagctgatcaacggcatccgggacaagcagtccggcaagacaatcctggatttcctgaagtccgacggcttcgccaacagaaacttcatgcagctgatccacgacgacagcctgacctttaaagaggacatccagaaagcccaggtgtccggccagggcgatagcctgcacgagcacattgccaatctggccggcagccccgccattaagaagggcatcctgcagacagtgaaggtggtggacgagctcgtgaaagtgatgggccggcacaagcccgagaacatcgtgatcgaaatggccagagagaaccagaccacccagaagggacagaagaacagccgcgagagaatgaagcggatcgaagagggcatcaaagagctgggcagccagatcctgaaagaacaccccgtggaaaacacccagctgcagaacgagaagctgtacctgtactacctgcagaatgggcgggatatgtacgtggaccaggaactggacatcaaccggctgtccgactacgatgtggacgctatcgtgcctcagagctttctgaaggacgactccatcgacaacaaggtgctgaccagaagcgacaagaaccggggcaagagcgacaacgtgccctccgaagaggtcgtgaagaagatgaagaactactggcggcagctgctgaacgccaagctgattacccagagaaagttcgacaatctgaccaaggccgagagaggcggcctgagcgaactggataaggccggcttcatcaagagacagctggtggaaacccggcagatcacaaagcacgtggcacagatcctggactcccggatgaacactaagtacgacgagaatgacaagctgatccgggaagtgaaagtgatcaccctgaagtccaagctggtgtccgatttccggaaggatttccagttttacaaagtgcgcgagatcaacaactaccaccacgcccacgacgcctacctgaacgccgtcgtgggaaccgccctgatcaaaaagtaccctaagctggaaagcgagttcgtgtacggcgactacaaggtgtacgacgtgcggaagatgatcgccaagagcgagcaggaaatcggcaaggctaccgccaagtacttcttctacagcaacatcatgaactttttcaagaccgagattaccctggccaacggcgagatccggaagcggcctctgatcgagacaaacggcgaaaccggggagatcgtgtgggataagggccgggattttgccaccgtgcggaaagtgctgagcatgccccaagtgaatatcgtgaaaaagaccgaggtgcagacaggcggcttcagcaaagagtctatcctgcccaagaggaacagcgataagctgatcgccagaaagaaggactgggaccctaagaagtacggcggcttcgacagccccaccgtggcctattctgtgctggtggtggccaaagtggaaaagggcaagtccaagaaactgaagagtgtgaaagagctgctggggatcaccatcatggaaagaagcagcttcgagaagaatcccatcgactttctggaagccaagggctacaaagaagtgaaaaaggacctgatcatcaagctgcctaagtactccctgttcgagctggaaaacggccggaagagaatgctggcctctgccggcgaactgcagaagggaaacgaactggccctgccctccaaatatgtgaacttcctgtacctggccagccactatgagaagctgaagggctcccccgaggataatgagcagaaacagctgtttgtggaacagcacaagcactacctggacgagatcatcgagcagatcagcgagttctccaagagagtgatcctggccgacgctaatctggacaaagtgctgtccgcctacaacaagcaccgggataagcccatcagagagcaggccgagaatatcatccacctgtttaccctgaccaatctgggagcccctgccgccttcaagtactttgacaccaccatcgaccggaagaggtacaccagcaccaaagaggtgctggacgccaccctgatccaccagagcatcaccggcctgtacgagacacggatcgacctgtctcagctgggaggtgactccggcggaagcagcggatctgaaacccctggcaccagcgaatctgccacccctgagtccagcggcagcgagacaccaggcaccagcgagagcgccacacccgagagcagcggcggctctaccctgaacatcgaggacgagtacaggctgcacgagaccagcaaggagcccgacgtgagcctgggcagcacctggctgagcgatttccctcaggcttgggccgagaccggcggcatgggcctggccgtgcggcaggcccccctgattatccccctgaaggccaccagcacccccgtgagcatcaagcagtacccaatgtcccaggaggccaggctgggcatcaagcctcacatccagaggctgctggaccagggcatcctggtgccatgccagtccccctggaacacccctctgctgcccgtgaagaagcctggcaccaacgactaccggcccgtgcaggacctgagagaagtgaacaagcgggtggaggacatccacccaaccgtgcccaacccttacaacctgctgtccggcctgccccccagccaccagtggtacaccgtgctggacctgaaggacgccttcttctgcctgagactgcaccccacctctcagcccctgttcgccttcgagtggcgcgaccccgagatgggcatcagcggccagctgacctggaccagactgccacagggctttaagaatagcccaaccctgtttaacgaggccctgcacagggacctggccgacttcaggatccagcaccccgacctgattctgctgcagtacgtggacgacctgctgctggccgctaccagcgagctggactgccagcagggcaccagagccctgctgcagaccctgggcaacctgggctacagagccagcgccaagaaggcccagatctgtcagaagcaggtgaagtatctgggctacctgctgaaggaaggccagagatggctgaccgaggccagaaaggagactgtgatgggccagcccacccccaagacccccaggcagctgcgggagttcctgggcaaggccggcttttgcagactgtttatccctggcttcgccgagatggccgccccactgtaccctctgaccaagcctggcaccctgtttaactggggccccgaccagcagaaggcctaccaggagatcaagcaggccctgctgaccgcccccgccctgggcctgcccgacctgaccaagcctttcgagctgttcgtggacgagaagcagggatacgccaaaggcgtgctgacccagaagctgggcccctggcggaggcccgtggcctacctgagcaaaaaactggaccctgtggccgccggctggcccccatgcctgcggatggtggccgccatcgctgtgctgaccaaggacgccggcaagctgaccatgggccagcccctggtgatcctggcccctcacgccgtggaggctctggtgaagcagcctccagacaggtggctgtccaacgccaggatgacccactaccaggccctgctgctggacaccgaccgggtgcagttcggccctgtggtggccctgaaccccgccaccctgctgcctctgccagaggagggcctgcagcacaactgcctggacatcctggccgaggcccacggc

SEQ ID NO: 226 - RNA, 5733 nt, synthetic construct
  misc_feature 1..5733: note = Description of Artificial Sequence: Synthetic polynucleotide
  source 1..5733: mol_type = other RNA
gacaagaagtacagcatcggcctggacatcggcaccaactctgtgggctgggccgtgatcaccgacgagtacaaggtgcccagcaagaaattcaaggtgctgggcaacaccgaccggcacagcatcaagaagaacctgatcggagccctgctgttcgacagcggcgaaacagccgaggccacccggctgaagagaaccgccagaagaagatacaccagacggaagaaccggatctgctatctgcaagagatcttcagcaacgagatggccaaggtggacgacagcttcttccacagactggaagagtccttcctggtggaagaggataagaagcacgagcggcaccccatcttcggcaacatcgtggacgaggtggcctaccacgagaagtaccccaccatctaccacctgagaaagaaactggtggacagcaccgacaaggccgacctgcggctgatctatctggccctggcccacatgatcaagttccggggccacttcctgatcgagggcgacctgaaccccgacaacagcgacgtggacaagctgttcatccagctggtgcagacctacaaccagctgttcgaggaaaaccccatcaacgccagcggcgtggacgccaaggccatcctgtctgccagactgagcaagagcagacggctggaaaatctgatcgcccagctgcccggcgagaagaagaatggcctgttcggaaacctgattgccctgagcctgggcctgacccccaacttcaagagcaacttcgacctggccgaggatgccaaactgcagctgagcaaggacacctacgacgacgacctggacaacctgctggcccagatcggcgaccagtacgccgacctgtttctggccgccaagaacctgtccgacgccatcctgctgagcgacatcctgagagtgaacaccgagatcaccaaggcccccctgagcgcctctatgatcaagagatacgacgagcaccaccaggacctgaccctgctgaaagctctcgtgcggcagcagctgcctgagaagtacaaagagattttcttcgaccagagcaagaacggctacgccggctacattgacggcggagccagccaggaagagttctacaagttcatcaagcccatcctggaaaagatggacggcaccgaggaactgctcgtgaagctgaacagagaggacctgctgcggaagcagcggaccttcgacaacggcagcatcccccaccagatccacctgggagagctgcacgccattctgcggcggcaggaagatttttacccattcctgaaggacaaccgggaaaagatcgagaagatcctgaccttccgcatcccctactacgtgggccctctggccaggggaaacagcagattcgcctggatgaccagaaagagcgaggaaaccatcaccccctggaacttcgaggaagtggtggacaagggcgcttccgcccagagcttcatcgagcggatgaccaacttcgataagaacctgcccaacgagaaggtgctgcccaagcacagcctgctgtacgagtacttcaccgtgtataacgagctgaccaaagtgaaatacgtgaccgagggaatgagaaagcccgccttcctgagcggcgagcagaaaaaggccatcgtggacctgctgttcaagaccaaccggaaagtgaccgtgaagcagctgaaagaggactacttcaagaaaatcgagtgcttcgactccgtggaaatctccggcgtggaagatcggttcaacgcctccctgggcacataccacgatctgctgaaaattatcaaggacaaggacttcctggacaatgaggaaaacgaggacattctggaagatatcgtgctgaccctgacactgtttgaggacagagagatgatcgaggaacggctgaaaacctatgcccacctgttcgacgacaaagtgatgaagcagctgaagcggcggagatacaccggctggggcaggctgagccggaagctgatcaacggcatccgggacaagcagtccggcaagacaatcctggatttcctgaagtccgacggcttcgccaacagaaacttcatgcagctgatccacgacgacagcctgacctttaaagaggacatccagaaagcccaggtgtccggccagggcgatagcctgcacgagcacattgccaatctggccggcagccccgccattaagaagggcatcctgcagacagtgaaggtggtggacgagctcgtgaaagtgatgggccggcacaagcccgagaacatcgtgatcgaaatggccagagagaaccagaccacccagaagggacagaagaacagccgcgagagaatgaagcggatcgaagagggcatcaaagagctgggcagccagatcctgaaagaacaccccgtggaaaacacccagctgcagaacgagaagctgtacctgtactacctgcagaatgggcgggatatgtacgtggaccaggaactggacatcaaccggctgtccgactacgatgtggacgctatcgtgcctcagagctttctgaaggacgactccatcgacaacaaggtgctgaccagaagcgacaagaaccggggcaagagcgacaacgtgccctccgaagaggtcgtgaagaagatgaagaactactggcggcagctgctgaacgccaagctgattacccagagaaagttcgacaatctgaccaaggccgagagaggcggcctgagcgaactggataaggccggcttcatcaagagacagctggtggaaacccggcagatcacaaagcacgtggcacagatcctggactcccggatgaacactaagtacgacgagaatgacaagctgatccgggaagtgaaagtgatcaccctgaagtccaagctggtgtccgatttccggaaggatttccagttttacaaagtgcgcgagatcaacaactaccaccacgcccacgacgcctacctgaacgccgtcgtgggaaccgccctgatcaaaaagtaccctaagctggaaagcgagttcgtgtacggcgactacaaggtgtacgacgtgcggaagatgatcgccaagagcgagcaggaaatcggcaaggctaccgccaagtacttcttctacagcaacatcatgaactttttcaagaccgagattaccctggccaacggcgagatccggaagcggcctctgatcgagacaaacggcgaaaccggggagatcgtgtgggataagggccgggattttgccaccgtgcggaaagtgctgagcatgccccaagtgaatatcgtgaaaaagaccgaggtgcagacaggcggcttcagcaaagagtctatcctgcccaagaggaacagcgataagctgatcgccagaaagaaggactgggaccctaagaagtacggcggcttcgacagccccaccgtggcctattctgtgctggtggtggccaaagtggaaaagggcaagtccaagaaactgaagagtgtgaaagagctgctggggatcaccatcatggaaagaagcagcttcgagaagaatcccatcgactttctggaagccaagggctacaaagaagtgaaaaaggacctgatcatcaagctgcctaagtactccctgttcgagctggaaaacggccggaagagaatgctggcctctgccggcgaactgcagaagggaaacgaactggccctgccctccaaatatgtgaacttcctgtacctggccagccactatgagaagctgaagggctcccccgaggataatgagcagaaacagctgtttgtggaacagcacaagcactacctggacgagatcatcgagcagatcagcgagttctccaagagagtgatcctggccgacgctaatctggacaaagtgctgtccgcctacaacaagcaccgggataagcccatcagagagcaggccgagaatatcatccacctgtttaccctgaccaatctgggagcccctgccgccttcaagtactttgacaccaccatcgaccggaagaggtacaccagcaccaaagaggtgctggacgccaccctgatccaccagagcatcaccggcctgtacgagacacggatcgacctgtctcagctgggaggtgactccggcggaagcagcggatctgaaacccctggcaccagcgaatctgccacccctgagtccagcggcagcgagacaccaggcaccagcgagagcgccacacccgagagcagcggcggctctaccctgaacatcgaggacgagtacaggctgcacgagaccagcaaggagcccgacgtgagcctgggcagcacctggctgagcgatttccctcaggcttgggccgagaccggcggcatgggcctggccgtgcggcaggcccccctgattatccccctgaaggccaccagcacccccgtgagcatcaagcagtacccaatgtcccaggaggccaggctgggcatcaagcctcacatccagaggctgctggaccagggcatcctggtgccatgccagtccccctggaacacccctctgctgcccgtgaagaagcctggcaccaacgactaccggcccgtgcaggacctgagagaagtgaacaagcgggtggaggacatccacccaaccgtgcccaacccttacaacctgctgtccggcctgccccccagccaccagtggtacaccgtgctggacctgaaggacgccttcttctgcctgagactgcaccccacctctcagcccctgttcgccttcgagtggcgcgaccccgagatgggcatcagcggccagctgacctggaccagactgccacagggctttaagaatagcccaaccctgtttaacgaggccctgcacagggacctggccgacttcaggatccagcaccccgacctgattctgctgcagtacgtggacgacctgctgctggccgctaccagcgagctggactgccagcagggcaccagagccctgctgcagaccctgggcaacctgggctacagagccagcgccaagaaggcccagatctgtcagaagcaggtgaagtatctgggctacctgctgaaggaaggccagagatggctgaccgaggccagaaaggagactgtgatgggccagcccacccccaagacccccaggcagctgcgggagttcctgggcaaggccggcttttgcagactgtttatccctggcttcgccgagatggccgccccactgtaccctctgaccaagcctggcaccctgtttaactggggccccgaccagcagaaggcctaccaggagatcaagcaggccctgctgaccgcccccgccctgggcctgcccgacctgaccaagcctttcgagctgttcgtggacgagaagcagggatacgccaaaggcgtgctgacccagaagctgggcccctggcggaggcccgtggcctacctgagcaaaaaactggaccctgtggccgccggctggcccccatgcctgcggatggtggccgccatcgctgtgctgaccaaggacgccggcaagctgaccatgggccagcccctggtgatcctggcccctcacgccgtggaggctctggtgaagcagcctccagacaggtggctgtccaacgccaggatgacccactaccaggccctgctgctggacaccgaccgggtgcagttcggccctgtggtggccctgaaccccgccaccctgctgcctctgccagaggagggcctgcagcacaactgcctggacatcctggccgaggcccacggc

SEQ ID NO: 227 - protein, 2092 aa, synthetic construct
  REGION 1..2092: note = Description of Artificial Sequence: Synthetic polypeptide
DKKYSIGLDIGTNSVGWAVITDEYKVPSKKFKVLGNTDRHSIKKNLIGALLFDSGETAEATRLKRTARRRYTRRKNRICYLQEIFSNEMAKVDDSFFHRLEESFLVEEDKKHERHPIFGNIVDEVAYHEKYPTIYHLRKKLVDSTDKADLRLIYLALAHMIKFRGHFLIEGDLNPDNSDVDKLFIQLVQTYNQLFEENPINASGVDAKAILSARLSKSRRLENLIAQLPGEKKNGLFGNLIALSLGLTPNFKSNFDLAEDAKLQLSKDTYDDDLDNLLAQIGDQYADLFLAAKNLSDAILLSDILRVNTEITKAPLSASMIKRYDEHHQDLTLLKALVRQQLPEKYKEIFFDQSKNGYAGYIDGGASQEEFYKFIKPILEKMDGTEELLVKLNREDLLRKQRTFDNGSIPHQIHLGELHAILRRQEDFYPFLKDNREKIEKILTFRIPYYVGPLARGNSRFAWMTRKSEETITPWNFEEVVDKGASAQSFIERMTNFDKNLPNEKVLPKHSLLYEYFTVYNELTKVKYVTEGMRKPAFLSGEQKKAIVDLLFKTNRKVTVKQLKEDYFKKIECFDSVEISGVEDRFNASLGTYHDLLKIIKDKDFLDNEENEDILEDIVLTLTLFEDREMIEERLKTYAHLFDDKVMKQLKRRRYTGWGRLSRKLINGIRDKQSGKTILDFLKSDGFANRNFMQLIHDDSLTFKEDIQKAQVSGQGDSLHEHIANLAGSPAIKKGILQTVKVVDELVKVMGRHKPENIVIEMARENQTTQKGQKNSRERMKRIEEGIKELGSQILKEHPVENTQLQNEKLYLYYLQNGRDMYVDQELDINRLSDYDVDAIVPQSFLKDDSIDNKVLTRSDKNRGKSDNVPSEEVVKKMKNYWRQLLNAKLITQRKFDNLTKAERGGLSELDKAGFIKRQLVETRQITKHVAQILDSRMNTKYDENDKLIREVKVITLKSKLVSDFRKDFQFYKVREINNYHHAHDAYLNAVVGTALIKKYPKLESEFVYGDYKVYDVRKMIAKSEQEIGKATAKYFFYSNIMNFFKTEITLANGEIRKRPLIETNGETGEIVWDKGRDFATVRKVLSMPQVNIVKKTEVQTGGFSKESILPKRNSDKLIARKKDWDPKKYGGFDSPTVAYSVLVVAKVEKGKSKKLKSVKELLGITIMERSSFEKNPIDFLEAKGYKEVKKDLIIKLPKYSLFELENGRKRMLASAGELQKGNELALPSKYVNFLYLASHYEKLKGSPEDNEQKQLFVEQHKHYLDEIIEQISEFSKRVILADANLDKVLSAYNKHRDKPIREQAENIIHLFTLTNLGAPAAFKYFDTTIDRKRYTSTKEVLDATLIHQSITGLYETRIDLSQLGGDSGGSSGGSSGSETPGTSESATPESSGSETPGTSESATPESSGGSSGGSTLNIEDEYRLHETSKEPDVSLGSTWLSDFPQAWAETGGMGLAVRQAPLIIPLKATSTPVSIKQYPMSQEARLGIKPHIQRLLDQGILVPCQSPWNTPLLPVKKPGTNDYRPVQDLREVNKRVEDIHPTVPNPYNLLSGLPPSHQWYTVLDLKDAFFCLRLHPTSQPLFAFEWRDPEMGISGQLTWTRLPQGFKNSPTLFNEALHRDLADFRIQHPDLILLQYVDDLLLAATSELDCQQGTRALLQTLGNLGYRASAKKAQICQKQVKYLGYLLKEGQRWLTEARKETVMGQPTPKTPRQLREFLGKAGFCRLFIPGFAEMAAPLYPLTKPGTLFNWGPDQQKAYQEIKQALLTAPALGLPDLTKPFELFVDEKQGYAKGVLTQKLGPWRRPVAYLSKKLDPVAAGWPPCLRMVAAIAVLTKDAGKLTMGQPLVILAPHAVEALVKQPPDRWLSNARMTHYQALLLDTDRVQFGPVVALNPATLLPLPEEGLQHNCLDILAEAHGTRPDLTDQPLPDADHTWYTDGSSLLQEGQRKAGAAVTTETEVIWAKALPAGTSAQRAELIALTQALKMAEGKKLNVYTDSRYAFATAHIHGEIYRRRGWLTSEGKEIKNKDEILALLKALFLPKRLSIIHCPGHQKGHSAEARGNRMADQAARKAAITETPDTSTLLIENSSP

SEQ ID NO: 228 - DNA, 6276 bp, synthetic construct
  misc_feature 1..6276: note = Description of Artificial Sequence: Synthetic polynucleotide
  source 1..6276: mol_type = other DNA
gacaagaagtacagcatcggcctggacatcggcaccaactctgtgggctgggccgtgatcaccgacgagtacaaggtgcccagcaagaaattcaaggtgctgggcaacaccgaccggcacagcatcaagaagaacctgatcggagccctgctgttcgacagcggcgaaacagccgaggccacccggctgaagagaaccgccagaagaagatacaccagacggaagaaccggatctgctatctgcaagagatcttcagcaacgagatggccaaggtggacgacagcttcttccacagactggaagagtccttcctggtggaagaggataagaagcacgagcggcaccccatcttcggcaacatcgtggacgaggtggcctaccacgagaagtaccccaccatctaccacctgagaaagaaactggtggacagcaccgacaaggccgacctgcggctgatctatctggccctggcccacatgatcaagttccggggccacttcctgatcgagggcgacctgaaccccgacaacagcgacgtggacaagctgttcatccagctggtgcagacctacaaccagctgttcgaggaaaaccccatcaacgccagcggcgtggacgccaaggccatcctgtctgccagactgagcaagagcagacggctggaaaatctgatcgcccagctgcccggcgagaagaagaatggcctgttcggaaacctgattgccctgagcctgggcctgacccccaacttcaagagcaacttcgacctggccgaggatgccaaactgcagctgagcaaggacacctacgacgacgacctggacaacctgctggcccagatcggcgaccagtacgccgacctgtttctggccgccaagaacctgtccgacgccatcctgctgagcgacatcctgagagtgaacaccgagatcaccaaggcccccctgagcgcctctatgatcaagagatacgacgagcaccaccaggacctgaccctgctgaaagctctcgtgcggcagcagctgcctgagaagtacaaagagattttcttcgaccagagcaagaacggctacgccggctacattgacggcggagccagccaggaagagttctacaagttcatcaagcccatcctggaaaagatggacggcaccgaggaactgctcgtgaagctgaacagagaggacctgctgcggaagcagcggaccttcgacaacggcagcatcccccaccagatccacctgggagagctgcacgccattctgcggcggcaggaagatttttacccattcctgaaggacaaccgggaaaagatcgagaagatcctgaccttccgcatcccctactacgtgggccctctggccaggggaaacagcagattcgcctggatgaccagaaagagcgaggaaaccatcaccccctggaacttcgaggaagtggtggacaagggcgcttccgcccagagcttcatcgagcggatgaccaacttcgataagaacctgcccaacgagaaggtgctgcccaagcacagcctgctgtacgagtacttcaccgtgtataacgagctgaccaaagtgaaatacgtgaccgagggaatgagaaagcccgccttcctgagcggcgagcagaaaaaggccatcgtggacctgctgttcaagaccaaccggaaagtgaccgtgaagcagctgaaagaggactacttcaagaaaatcgagtgcttcgactccgtggaaatctccggcgtggaagatcggttcaacgcctccctgggcacataccacgatctgctgaaaattatcaaggacaaggacttcctggacaatgaggaaaacgaggacattctggaagatatcgtgctgaccctgacactgtttgaggacagagagatgatcgaggaacggctgaaaacctatgcccacctgttcgacgacaaagtgatgaagcagctgaagcggcggagatacaccggctggggcaggctgagccggaagctgatcaacggcatccgggacaagcagtccggcaagacaatcctggatttcctgaagtccgacggcttcgccaacagaaacttcatgcagctgatccacgacgacagcctgacctttaaagaggacatccagaaagcccaggtgtccggccagggcgatagcctgcacgagcacattgccaatctggccggcagccccgccattaagaagggcatcctgcagacagtgaaggtggtggacgagctcgtgaaagtgatgggccggcacaagcccgagaacatcgtgatcgaaatggccagagagaaccagaccacccagaagggacagaagaacagccgcgagagaatgaagcggatcgaagagggcatcaaagagctgggcagccagatcctgaaagaacaccccgtggaaaacacccagctgcagaacgagaagctgtacctgtactacctgcagaatgggcgggatatgtacgtggaccaggaactggacatcaaccggctgtccgactacgatgtggacgctatcgtgcctcagagctttctgaaggacgactccatcgacaacaaggtgctgaccagaagcgacaagaaccggggcaagagcgacaacgtgccctccgaagaggtcgtgaagaagatgaagaactactggcggcagctgctgaacgccaagctgattacccagagaaagttcgacaatctgaccaaggccgagagaggcggcctgagcgaactggataaggccggcttcatcaagagacagctggtggaaacccggcagatcacaaagcacgtggcacagatcctggactcccggatgaacactaagtacgacgagaatgacaagctgatccgggaagtgaaagtgatcaccctgaagtccaagctggtgtccgatttccggaaggatttccagttttacaaagtgcgcgagatcaacaactaccaccacgcccacgacgcctacctgaacgccgtcgtgggaaccgccctgatcaaaaagtaccctaagctggaaagcgagttcgtgtacggcgactacaaggtgtacgacgtgcggaagatgatcgccaagagcgagcaggaaatcggcaaggctaccgccaagtacttcttctacagcaacatcatgaactttttcaagaccgagattaccctggccaacggcgagatccggaagcggcctctgatcgagacaaacggcgaaaccggggagatcgtgtgggataagggccgggattttgccaccgtgcggaaagtgctgagcatgccccaagtgaatatcgtgaaaaagaccgaggtgcagacaggcggcttcagcaaagagtctatcctgcccaagaggaacagcgataagctgatcgccagaaagaaggactgggaccctaagaagtacggcggcttcgacagccccaccgtggcctattctgtgctggtggtggccaaagtggaaaagggcaagtccaagaaactgaagagtgtgaaagagctgctggggatcaccatcatggaaagaagcagcttcgagaagaatcccatcgactttctggaagccaagggctacaaagaagtgaaaaaggacctgatcatcaagctgcctaagtactccctgttcgagctggaaaacggccggaagagaatgctggcctctgccggcgaactgcagaagggaaacgaactggccctgccctccaaatatgtgaacttcctgtacctggccagccactatgagaagctgaagggctcccccgaggataatgagcagaaacagctgtttgtggaacagcacaagcactacctggacgagatcatcgagcagatcagcgagttctccaagagagtgatcctggccgacgctaatctggacaaagtgctgtccgcctacaacaagcaccgggataagcccatcagagagcaggccgagaatatcatccacctgtttaccctgaccaatctgggagcccctgccgccttcaagtactttgacaccaccatcgaccggaagaggtacaccagcaccaaagaggtgctggacgccaccctgatccaccagagcatcaccggcctgtacgagacacggatcgacctgtctcagctgggaggtgactccggcggaagcagcggaggcagctctggctctgaaacccctggcaccagcgaatctgccacaccagagtctagcggcagcgagacacccggcaccagcgagagcgccacccctgagagcagcggcggctcctccggcggaagcaccctgaacatcgaggacgagtacaggctgcacgagaccagcaaggagcccgacgtgagcctgggcagcacctggctgagcgatttccctcaggcttgggccgagaccggcggcatgggcctggccgtgcggcaggcccccctgattatccccctgaaggccaccagcacccccgtgagcatcaagcagtacccaatgtcccaggaggccaggctgggcatcaagcctcacatccagaggctgctggaccagggcatcctggtgccatgccagtccccctggaacacccctctgctgcccgtgaagaagcctggcaccaacgactaccggcccgtgcaggacctgagagaagtgaacaagcgggtggaggacatccacccaaccgtgcccaacccttacaacctgctgtccggcctgccccccagccaccagtggtacaccgtgctggacctgaaggacgccttcttctgcctgagactgcaccccacctctcagcccctgttcgccttcgagtggcgcgaccccgagatgggcatcagcggccagctgacctggaccagactgccacagggctttaagaatagcccaaccctgtttaacgaggccctgcacagggacctggccgacttcaggatccagcaccccgacctgattctgctgcagtacgtggacgacctgctgctggccgctaccagcgagctggactgccagcagggcaccagagccctgctgcagaccctgggcaacctgggctacagagccagcgccaagaaggcccagatctgtcagaagcaggtgaagtatctgggctacctgctgaaggaaggccagagatggctgaccgaggccagaaaggagactgtgatgggccagcccacccccaagacccccaggcagctgcgggagttcctgggcaaggccggcttttgcagactgtttatccctggcttcgccgagatggccgccccactgtaccctctgaccaagcctggcaccctgtttaactggggccccgaccagcagaaggcctaccaggagatcaagcaggccctgctgaccgcccccgccctgggcctgcccgacctgaccaagcctttcgagctgttcgtggacgagaagcagggatacgccaaaggcgtgctgacccagaagctgggcccctggcggaggcccgtggcctacctgagcaaaaaactggaccctgtggccgccggctggcccccatgcctgcggatggtggccgccatcgctgtgctgaccaaggacgccggcaagctgaccatgggccagcccctggtgatcctggcccctcacgccgtggaggctctggtgaagcagcctccagacaggtggctgtccaacgccaggatgacccactaccaggccctgctgctggacaccgaccgggtgcagttcggccctgtggtggccctgaaccccgccaccctgctgcctctgccagaggagggcctgcagcacaactgcctggacatcctggccgaggcccacggcaccaggcccgacctgaccgaccagcccctgcctgacgccgaccacacctggtacaccgacggcagctccctgctgcaggagggccagaggaaggccggcgccgccgtgaccaccgagaccgaggtgatctgggccaaagccctgcctgccggcacctccgcccagcgggccgagctgatcgccctgacccaggccctgaagatggctgagggcaagaagctgaacgtgtacaccgattccagatacgccttcgccaccgcccacatccacggcgagatctacagaagaaggggctggctgacctccgagggcaaggagatcaagaacaaggacgagattctggccctgctgaaggccctgttcctgcctaagagactgagcatcatccactgtcccggccaccagaagggccacagcgccgaggccagaggcaatagaatggccgaccaggccgccagaaaggccgccatcaccgagacccccgacaccagcaccctgctgatcgagaacagcagcccc

SEQ ID NO: 229 - RNA, 6276 nt, synthetic construct
  misc_feature 1..6276: note = Description of Artificial Sequence: Synthetic polynucleotide
  source 1..6276: mol_type = other RNA
gacaagaagtacagcatcggcctggacatcggcaccaactctgtgggctgggccgtgatcaccgacgagtacaaggtgcccagcaagaaattcaaggtgctgggcaacaccgaccggcacagcatcaagaagaacctgatcggagccctgctgttcgacagcggcgaaacagccgaggccacccggctgaagagaaccgccagaagaagatacaccagacggaagaaccggatctgctatctgcaagagatcttcagcaacgagatggccaaggtggacgacagcttcttccacagactggaagagtccttcctggtggaagaggataagaagcacgagcggcaccccatcttcggcaacatcgtggacgaggtggcctaccacgagaagtaccccaccatctaccacctgagaaagaaactggtggacagcaccgacaaggccgacctgcggctgatctatctggccctggcccacatgatcaagttccggggccacttcctgatcgagggcgacctgaaccccgacaacagcgacgtggacaagctgttcatccagctggtgcagacctacaaccagctgttcgaggaaaaccccatcaacgccagcggcgtggacgccaaggccatcctgtctgccagactgagcaagagcagacggctggaaaatctgatcgcccagctgcccggcgagaagaagaatggcctgttcggaaacctgattgccctgagcctgggcctgacccccaacttcaagagcaacttcgacctggccgaggatgccaaactgcagctgagcaaggacacctacgacgacgacctggacaacctgctggcccagatcggcgaccagtacgccgacctgtttctggccgccaagaacctgtccgacgccatcctgctgagcgacatcctgagagtgaacaccgagatcaccaaggcccccctgagcgcctctatgatcaagagatacgacgagcaccaccaggacctgaccctgctgaaagctctcgtgcggcagcagctgcctgagaagtacaaagagattttcttcgaccagagcaagaacggctacgccggctacattgacggcggagccagccaggaagagttctacaagttcatcaagcccatcctggaaaagatggacggcaccgaggaactgctcgtgaagctgaacagagaggacctgctgcggaagcagcggaccttcgacaacggcagcatcccccaccagatccacctgggagagctgcacgccattctgcggcggcaggaagatttttacccattcctgaaggacaaccgggaaaagatcgagaagatcctgaccttccgcatcccctactacgtgggccctctggccaggggaaacagcagattcgcctggatgaccagaaagagcgaggaaaccatcaccccctggaacttcgaggaagtggtggacaagggcgcttccgcccagagcttcatcgagcggatgaccaacttcgataagaacctgcccaacgagaaggtgctgcccaagcacagcctgctgtacgagtacttcaccgtgtataacgagctgaccaaagtgaaatacgtgaccgagggaatgagaaagcccgccttcctgagcggcgagcagaaaaaggccatcgtggacctgctgttcaagaccaaccggaaagtgaccgtgaagcagctgaaagaggactacttcaagaaaatcgagtgcttcgactccgtggaaatctccggcgtggaagatcggttcaacgcctccctgggcacataccacgatctgctgaaaattatcaaggacaaggacttcctggacaatgaggaaaacgaggacattctggaagatatcgtgctgaccctgacactgtttgaggacagagagatgatcgaggaacggctgaaaacctatgcccacctgttcgacgacaaagtgatgaagcagctgaagcggcggagatacaccggctggggcaggctgagccggaagctgatcaacggcatccgggacaagcagtccggcaagacaatcctggatttcctgaagtccgacggcttcgccaacagaaacttcatgcagctgatccacgacgacagcctgacctttaaagaggacatccagaaagcccaggtgtccggccagggcgatagcctgcacgagcacattgccaatctggccggcagccccgccattaagaagggcatcctgcagacagtgaaggtggtggacgagctcgtgaaagtgatgggccggcacaagcccgagaacatcgtgatcgaaatggccagagagaaccagaccacccagaagggacagaagaacagccgcgagagaatgaagcggatcgaagagggcatcaaagagctgggcagccagatcctgaaagaacaccccgtggaaaacacccagctgcagaacgagaagctgtacctgtactacctgcagaatgggcgggatatgtacgtggaccaggaactggacatcaaccggctgtccgactacgatgtggacgctatcgtgcctcagagctttctgaaggacgactccatcgacaacaaggtgctgaccagaagcgacaagaaccggggcaagagcgacaacgtgccctccgaagaggtcgtgaagaagatgaagaactactggcggcagctgctgaacgccaagctgattacccagagaaagttcgacaatctgaccaaggccgagagaggcggcctgagcgaactggataaggccggcttcatcaagagacagctggtggaaacccggcagatcacaaagcacgtggcacagatcctggactcccggatgaacactaagtacgacgagaatgacaagctgatccgggaagtgaaagtgatcaccctgaagtccaagctggtgtccgatttccggaaggatttccagttttacaaagtgcgcgagatcaacaactaccaccacgcccacgacgcctacctgaacgccgtcgtgggaaccgccctgatcaaaaagtaccctaagctggaaagcgagttcgtgtacggcgactacaaggtgtacgacgtgcggaagatgatcgccaagagcgagcaggaaatcggcaaggctaccgccaagtacttcttctacagcaacatcatgaactttttcaagaccgagattaccctggccaacggcgagatccggaagcggcctctgatcgagacaaacggcgaaaccggggagatcgtgtgggataagggccgggattttgccaccgtgcggaaagtgctgagcatgccccaagtgaatatcgtgaaaaagaccgaggtgcagacaggcggcttcagcaaagagtctatcctgcccaagaggaacagcgataagctgatcgccagaaagaaggactgggaccctaagaagtacggcggcttcgacagccccaccgtggcctattctgtgctggtggtggccaaagtggaaaagggcaagtccaagaaactgaagagtgtgaaagagctgctggggatcaccatcatggaaagaagcagcttcgagaagaatcccatcgactttctggaagccaagggctacaaagaagtgaaaaaggacctgatcatcaagctgcctaagtactccctgttcgagctggaaaacggccggaagagaatgctggcctctgccggcgaactgcagaagggaaacgaactggccctgccctccaaatatgtgaacttcctgtacctggccagccactatgagaagctgaagggctcccccgaggataatgagcagaaacagctgtttgtggaacagcacaagcactacctggacgagatcatcgagcagatcagcgagttctccaagagagtgatcctggccgacgctaatctggacaaagtgctgtccgcctacaacaagcaccgggataagcccatcagagagcaggccgagaatatcatccacctgtttaccctgaccaatctgggagcccctgccgccttcaagtactttgacaccaccatcgaccggaagaggtacaccagcaccaaagaggtgctggacgccaccctgatccaccagagcatcaccggcctgtacgagacacggatcgacctgtctcagctgggaggtgactccggcggaagcagcggaggcagctctggctctgaaacccctggcaccagcgaatctgccacaccagagtctagcggcagcgagacacccggcaccagcgagagcgccacccctgagagcagcggcggctcctccggcggaagcaccctgaacatcgaggacgagtacaggctgcacgagaccagcaaggagcccgacgtgagcctgggcagcacctggctgagcgatttccctcaggcttgggccgagaccggcggcatgggcctggccgtgcggcaggcccccctgattatccccctgaaggccaccagcacccccgtgagcatcaagcagtacccaatgtcccaggaggccaggctgggcatcaagcctcacatccagaggctgctggaccagggcatcctggtgccatgccagtccccctggaacacccctctgctgcccgtgaagaagcctggcaccaacgactaccggcccgtgcaggacctgagagaagtgaacaagcgggtggaggacatccacccaaccgtgcccaacccttacaacctgctgtccggcctgccccccagccaccagtggtacaccgtgctggacctgaaggacgccttcttctgcctgagactgcaccccacctctcagcccctgttcgccttcgagtggcgcgaccccgagatgggcatcagcggccagctgacctggaccagactgccacagggctttaagaatagcccaaccctgtttaacgaggccctgcacagggacctggccgacttcaggatccagcaccccgacctgattctgctgcagtacgtggacgacctgctgctggccgctaccagcgagctggactgccagcagggcaccagagccctgctgcagaccctgggcaacctgggctacagagccagcgccaagaaggcccagatctgtcagaagcaggtgaagtatctgggctacctgctgaaggaaggccagagatggctgaccgaggccagaaaggagactgtgatgggccagcccacccccaagacccccaggcagctgcgggagttcctgggcaaggccggcttttgcagactgtttatccctggcttcgccgagatggccgccccactgtaccctctgaccaagcctggcaccctgtttaactggggccccgaccagcagaaggcctaccaggagatcaagcaggccctgctgaccgcccccgccctgggcctgcccgacctgaccaagcctttcgagctgttcgtggacgagaagcagggatacgccaaaggcgtgctgacccagaagctgggcccctggcggaggcccgtggcctacctgagcaaaaaactggaccctgtggccgccggctggcccccatgcctgcggatggtggccgccatcgctgtgctgaccaaggacgccggcaagctgaccatgggccagcccctggtgatcctggcccctcacgccgtggaggctctggtgaagcagcctccagacaggtggctgtccaacgccaggatgacccactaccaggccctgctgctggacaccgaccgggtgcagttcggccctgtggtggccctgaaccccgccaccctgctgcctctgccagaggagggcctgcagcacaactgcctggacatcctggccgaggcccacggcaccaggcccgacctgaccgaccagcccctgcctgacgccgaccacacctggtacaccgacggcagctccctgctgcaggagggccagaggaaggccggcgccgccgtgaccaccgagaccgaggtgatctgggccaaagccctgcctgccggcacctccgcccagcgggccgagctgatcgccctgacccaggccctgaagatggctgagggcaagaagctgaacgtgtacaccgattccagatacgccttcgccaccgcccacatccacggcgagatctacagaagaaggggctggctgacctccgagggcaaggagatcaagaacaaggacgagattctggccctgctgaaggccctgttcctgcctaagagactgagcatcatccactgtcccggccaccagaagggccacagcgccgaggccagaggcaatagaatggccgaccaggccgccagaaaggccgccatcaccgagacccccgacaccagcaccctgctgatcgagaacagcagcccc

SEQ ID NO: 230 - protein, 1919 aa, synthetic construct
  REGION 1..1919: note = Description of Artificial Sequence: Synthetic polypeptide
DKKYSIGLDIGTNSVGWAVITDEYKVPSKKFKVLGNTDRHSIKKNLIGALLFDSGETAEATRLKRTARRRYTRRKNRICYLQEIFSNEMAKVDDSFFHRLEESFLVEEDKKHERHPIFGNIVDEVAYHEKYPTIYHLRKKLVDSTDKADLRLIYLALAHMIKFRGHFLIEGDLNPDNSDVDKLFIQLVQTYNQLFEENPINASGVDAKAILSARLSKSRRLENLIAQLPGEKKNGLFGNLIALSLGLTPNFKSNFDLAEDAKLQLSKDTYDDDLDNLLAQIGDQYADLFLAAKNLSDAILLSDILRVNTEITKAPLSASMIKRYDEHHQDLTLLKALVRQQLPEKYKEIFFDQSKNGYAGYIDGGASQEEFYKFIKPILEKMDGTEELLVKLNREDLLRKQRTFDNGSIPHQIHLGELHAILRRQEDFYPFLKDNREKIEKILTFRIPYYVGPLARGNSRFAWMTRKSEETITPWNFEEVVDKGASAQSFIERMTNFDKNLPNEKVLPKHSLLYEYFTVYNELTKVKYVTEGMRKPAFLSGEQKKAIVDLLFKTNRKVTVKQLKEDYFKKIECFDSVEISGVEDRFNASLGTYHDLLKIIKDKDFLDNEENEDILEDIVLTLTLFEDREMIEERLKTYAHLFDDKVMKQLKRRRYTGWGRLSRKLINGIRDKQSGKTILDFLKSDGFANRNFMQLIHDDSLTFKEDIQKAQVSGQGDSLHEHIANLAGSPAIKKGILQTVKVVDELVKVMGRHKPENIVIEMARENQTTQKGQKNSRERMKRIEEGIKELGSQILKEHPVENTQLQNEKLYLYYLQNGRDMYVDQELDINRLSDYDVDAIVPQSFLKDDSIDNKVLTRSDKNRGKSDNVPSEEVVKKMKNYWRQLLNAKLITQRKFDNLTKAERGGLSELDKAGFIKRQLVETRQITKHVAQILDSRMNTKYDENDKLIREVKVITLKSKLVSDFRKDFQFYKVREINNYHHAHDAYLNAVVGTALIKKYPKLESEFVYGDYKVYDVRKMIAKSEQEIGKATAKYFFYSNIMNFFKTEITLANGEIRKRPLIETNGETGEIVWDKGRDFATVRKVLSMPQVNIVKKTEVQTGGFSKESILPKRNSDKLIARKKDWDPKKYGGFDSPTVAYSVLVVAKVEKGKSKKLKSVKELLGITIMERSSFEKNPIDFLEAKGYKEVKKDLIIKLPKYSLFELENGRKRMLASAGELQKGNELALPSKYVNFLYLASHYEKLKGSPEDNEQKQLFVEQHKHYLDEIIEQISEFSKRVILADANLDKVLSAYNKHRDKPIREQAENIIHLFTLTNLGAPAAFKYFDTTIDRKRYTSTKEVLDATLIHQSITGLYETRIDLSQLGGDSGGSSGGSSGSETPGTSESATPESSGSETPGTSESATPESSGGSSGGSTLNIEDEYRLHETSKEPDVSLGSTWLSDFPQAWAETGGMGLAVRQAPLIIPLKATSTPVSIKQYPMSQEARLGIKPHIQRLLDQGILVPCQSPWNTPLLPVKKPGTNDYRPVQDLREVNKRVEDIHPTVPNPYNLLSGLPPSHQWYTVLDLKDAFFCLRLHPTSQPLFAFEWRDPEMGISGQLTWTRLPQGFKNSPTLFNEALHRDLADFRIQHPDLILLQYVDDLLLAATSELDCQQGTRALLQTLGNLGYRASAKKAQICQKQVKYLGYLLKEGQRWLTEARKETVMGQPTPKTPRQLREFLGKAGFCRLFIPGFAEMAAPLYPLTKPGTLFNWGPDQQKAYQEIKQALLTAPALGLPDLTKPFELFVDEKQGYAKGVLTQKLGPWRRPVAYLSKKLDPVAAGWPPCLRMVAAIAVLTKDAGKLTMGQPLVILAPHAVEALVKQPPDRWLSNARMTHYQALLLDTDRVQFGPVVALNPATLLPLPEEGLQHNCLDILAEAHG

SEQ ID NO: 231 - DNA, 5757 bp, synthetic construct
  misc_feature 1..5757: note = Description of Artificial Sequence: Synthetic polynucleotide
  source 1..5757: mol_type = other DNA
gacaagaagtacagcatcggcctggacatcggcaccaactctgtgggctgggccgtgatcaccgacgagtacaaggtgcccagcaagaaattcaaggtgctgggcaacaccgaccggcacagcatcaagaagaacctgatcggagccctgctgttcgacagcggcgaaacagccgaggccacccggctgaagagaaccgccagaagaagatacaccagacggaagaaccggatctgctatctgcaagagatcttcagcaacgagatggccaaggtggacgacagcttcttccacagactggaagagtccttcctggtggaagaggataagaagcacgagcggcaccccatcttcggcaacatcgtggacgaggtggcctaccacgagaagtaccccaccatctaccacctgagaaagaaactggtggacagcaccgacaaggccgacctgcggctgatctatctggccctggcccacatgatcaagttccggggccacttcctgatcgagggcgacctgaaccccgacaacagcgacgtggacaagctgttcatccagctggtgcagacctacaaccagctgttcgaggaaaaccccatcaacgccagcggcgtggacgccaaggccatcctgtctgccagactgagcaagagcagacggctggaaaatctgatcgcccagctgcccggcgagaagaagaatggcctgttcggaaacctgattgccctgagcctgggcctgacccccaacttcaagagcaacttcgacctggccgaggatgccaaactgcagctgagcaaggacacctacgacgacgacctggacaacctgctggcccagatcggcgaccagtacgccgacctgtttctggccgccaagaacctgtccgacgccatcctgctgagcgacatcctgagagtgaacaccgagatcaccaaggcccccctgagcgcctctatgatcaagagatacgacgagcaccaccaggacctgaccctgctgaaagctctcgtgcggcagcagctgcctgagaagtacaaagagattttcttcgaccagagcaagaacggctacgccggctacattgacggcggagccagccaggaagagttctacaagttcatcaagcccatcctggaaaagatggacggcaccgaggaactgctcgtgaagctgaacagagaggacctgctgcggaagcagcggaccttcgacaacggcagcatcccccaccagatccacctgggagagctgcacgccattctgcggcggcaggaagatttttacccattcctgaaggacaaccgggaaaagatcgagaagatcctgaccttccgcatcccctactacgtgggccctctggccaggggaaacagcagattcgcctggatgaccagaaagagcgaggaaaccatcaccccctggaacttcgaggaagtggtggacaagggcgcttccgcccagagcttcatcgagcggatgaccaacttcgataagaacctgcccaacgagaaggtgctgcccaagcacagcctgctgtacgagtacttcaccgtgtataacgagctgaccaaagtgaaatacgtgaccgagggaatgagaaagcccgccttcctgagcggcgagcagaaaaaggccatcgtggacctgctgttcaagaccaaccggaaagtgaccgtgaagcagctgaaagaggactacttcaagaaaatcgagtgcttcgactccgtggaaatctccggcgtggaagatcggttcaacgcctccctgggcacataccacgatctgctgaaaattatcaaggacaaggacttcctggacaatgaggaaaacgaggacattctggaagatatcgtgctgaccctgacactgtttgaggacagagagatgatcgaggaacggctgaaaacctatgcccacctgttcgacgacaaagtgatgaagcagctgaagcggcggagatacaccggctggggcaggctgagccggaagctgatcaacggcatccgggacaagcagtccggcaagacaatcctggatttcctgaagtccgacggcttcgccaacagaaacttcatgcagctgatccacgacgacagcctgacctttaaagaggacatccagaaagcccaggtgtccggccagggcgatagcctgcacgagcacattgccaatctggccggcagccccgccattaagaagggcatcctgcagacagtgaaggtggtggacgagctcgtgaaagtgatgggccggcacaagcccgagaacatcgtgatcgaaatggccagagagaaccagaccacccagaagggacagaagaacagccgcgagagaatgaagcggatcgaagagggcatcaaagagctgggcagccagatcctgaaagaacaccccgtggaaaacacccagctgcagaacgagaagctgtacctgtactacctgcagaatgggcgggatatgtacgtggaccaggaactggacatcaaccggctgtccgactacgatgtggacgctatcgtgcctcagagctttctgaaggacgactccatcgacaacaaggtgctgaccagaagcgacaagaaccggggcaagagcgacaacgtgccctccgaagaggtcgtgaagaagatgaagaactactggcggcagctgctgaacgccaagctgattacccagagaaagttcgacaatctgaccaaggccgagagaggcggcctgagcgaactggataaggccggcttcatcaagagacagctggtggaaacccggcagatcacaaagcacgtggcacagatcctggactcccggatgaacactaagtacgacgagaatgacaagctgatccgggaagtgaaagtgatcaccctgaagtccaagctggtgtccgatttccggaaggatttccagttttacaaagtgcgcgagatcaacaactaccaccacgcccacgacgcctacctgaacgccgtcgtgggaaccgccctgatcaaaaagtaccctaagctggaaagcgagttcgtgtacggcgactacaaggtgtacgacgtgcggaagatgatcgccaagagcgagcaggaaatcggcaaggctaccgccaagtacttcttctacagcaacatcatgaactttttcaagaccgagattaccctggccaacggcgagatccggaagcggcctctgatcgagacaaacggcgaaaccggggagatcgtgtgggataagggccgggattttgccaccgtgcggaaagtgctgagcatgccccaagtgaatatcgtgaaaaagaccgaggtgcagacaggcggcttcagcaaagagtctatcctgcccaagaggaacagcgataagctgatcgccagaaagaaggactgggaccctaagaagtacggcggcttcgacagccccaccgtggcctattctgtgctggtggtggccaaagtggaaaagggcaagtccaagaaactgaagagtgtgaaagagctgctggggatcaccatcatggaaagaagcagcttcgagaagaatcccatcgactttctggaagccaagggctacaaagaagtgaaaaaggacctgatcatcaagctgcctaagtactccctgttcgagctggaaaacggccggaagagaatgctggcctctgccggcgaactgcagaagggaaacgaactggccctgccctccaaatatgtgaacttcctgtacctggccagccactatgagaagctgaagggctcccccgaggataatgagcagaaacagctgtttgtggaacagcacaagcactacctggacgagatcatcgagcagatcagcgagttctccaagagagtgatcctggccgacgctaatctggacaaagtgctgtccgcctacaacaagcaccgggataagcccatcagagagcaggccgagaatatcatccacctgtttaccctgaccaatctgggagcccctgccgccttcaagtactttgacaccaccatcgaccggaagaggtacaccagcaccaaagaggtgctggacgccaccctgatccaccagagcatcaccggcctgtacgagacacggatcgacctgtctcagctgggaggtgactccggcggaagcagcggaggcagctctggctctgaaacccctggcaccagcgaatctgccacaccagagtctagcggcagcgagacacccggcaccagcgagagcgccacccctgagagcagcggcggctcctccggcggaagcaccctgaacatcgaggacgagtacaggctgcacgagaccagcaaggagcccgacgtgagcctgggcagcacctggctgagcgatttccctcaggcttgggccgagaccggcggcatgggcctggccgtgcggcaggcccccctgattatccccctgaaggccaccagcacccccgtgagcatcaagcagtacccaatgtcccaggaggccaggctgggcatcaagcctcacatccagaggctgctggaccagggcatcctggtgccatgccagtccccctggaacacccctctgctgcccgtgaagaagcctggcaccaacgactaccggcccgtgcaggacctgagagaagtgaacaagcgggtggaggacatccacccaaccgtgcccaacccttacaacctgctgtccggcctgccccccagccaccagtggtacaccgtgctggacctgaaggacgccttcttctgcctgagactgcaccccacctctcagcccctgttcgccttcgagtggcgcgaccccgagatgggcatcagcggccagctgacctggaccagactgccacagggctttaagaatagcccaaccctgtttaacgaggccctgcacagggacctggccgacttcaggatccagcaccccgacctgattctgctgcagtacgtggacgacctgctgctggccgctaccagcgagctggactgccagcagggcaccagagccctgctgcagaccctgggcaacctgggctacagagccagcgccaagaaggcccagatctgtcagaagcaggtgaagtatctgggctacctgctgaaggaaggccagagatggctgaccgaggccagaaaggagactgtgatgggccagcccacccccaagacccccaggcagctgcgggagttcctgggcaaggccggcttttgcagactgtttatccctggcttcgccgagatggccgccccactgtaccctctgaccaagcctggcaccctgtttaactggggccccgaccagcagaaggcctaccaggagatcaagcaggccctgctgaccgcccccgccctgggcctgcccgacctgaccaagcctttcgagctgttcgtggacgagaagcagggatacgccaaaggcgtgctgacccagaagctgggcccctggcggaggcccgtggcctacctgagcaaaaaactggaccctgtggccgccggctggcccccatgcctgcggatggtggccgccatcgctgtgctgaccaaggacgccggcaagctgaccatgggccagcccctggtgatcctggcccctcacgccgtggaggctctggtgaagcagcctccagacaggtggctgtccaacgccaggatgacccactaccaggccctgctgctggacaccgaccgggtgcagttcggccctgtggtggccctgaaccccgccaccctgctgcctctgccagaggagggcctgcagcacaactgcctggacatcctggccgaggcccacggc

SEQ ID NO: 232 - RNA, 5757 nt, synthetic construct
  misc_feature 1..5757: note = Description of Artificial Sequence: Synthetic polynucleotide
  source 1..5757: mol_type = other RNA
gacaagaagtacagcatcggcctggacatcggcaccaactctgtgggctgggccgtgatcaccgacgagtacaaggtgcccagcaagaaattcaaggtgctgggcaacaccgaccggcacagcatcaagaagaacctgatcggagccctgctgttcgacagcggcgaaacagccgaggccacccggctgaagagaaccgccagaagaagatacaccagacggaagaaccggatctgctatctgcaagagatcttcagcaacgagatggccaaggtggacgacagcttcttccacagactggaagagtccttcctggtggaagaggataagaagcacgagcggcaccccatcttcggcaacatcgtggacgaggtggcctaccacgagaagtaccccaccatctaccacctgagaaagaaactggtggacagcaccgacaaggccgacctgcggctgatctatctggccctggcccacatgatcaagttccggggccacttcctgatcgagggcgacctgaaccccgacaacagcgacgtggacaagctgttcatccagctggtgcagacctacaaccagctgttcgaggaaaaccccatcaacgccagcggcgtggacgccaaggccatcctgtctgccagactgagcaagagcagacggctggaaaatctgatcgcccagctgcccggcgagaagaagaatggcctgttcggaaacctgattgccctgagcctgggcctgacccccaacttcaagagcaacttcgacctggccgaggatgccaaactgcagctgagcaaggacacctacgacgacgacctggacaacctgctggcccagatcggcgaccagtacgccgacctgtttctggccgccaagaacctgtccgacgccatcctgctgagcgacatcctgagagtgaacaccgagatcaccaaggcccccctgagcgcctctatgatcaagagatacgacgagcaccaccaggacctgaccctgctgaaagctctcgtgcggcagcagctgcctgagaagtacaaagagattttcttcgaccagagcaagaacggctacgccggctacattgacggcggagccagccaggaagagttctacaagttcatcaagcccatcctggaaaagatggacggcaccgaggaactgctcgtgaagctgaacagagaggacctgctgcggaagcagcggaccttcgacaacggcagcatcccccaccagatccacctgggagagctgcacgccattctgcggcggcaggaagatttttacccattcctgaaggacaaccgggaaaagatcgagaagatcctgaccttccgcatcccctactacgtgggccctctggccaggggaaacagcagattcgcctggatgaccagaaagagcgaggaaaccatcaccccctggaacttcgaggaagtggtggacaagggcgcttccgcccagagcttcatcgagcggatgaccaacttcgataagaacctgcccaacgagaaggtgctgcccaagcacagcctgctgtacgagtacttcaccgtgtataacgagctgaccaaagtgaaatacgtgaccgagggaatgagaaagcccgccttcctgagcggcgagcagaaaaaggccatcgtggacctgctgttcaagaccaaccggaaagtgaccgtgaagcagctgaaagaggactacttcaagaaaatcgagtgcttcgactccgtggaaatctccggcgtggaagatcggttcaacgcctccctgggcacataccacgatctgctgaaaattatcaaggacaaggacttcctggacaatgaggaaaacgaggacattctggaagatatcgtgctgaccctgacactgtttgaggacagagagatgatcgaggaacggctgaaaacctatgcccacctgttcgacgacaaagtgatgaagcagctgaagcggcggagatacaccggctggggcaggctgagccggaagctgatcaacggcatccgggacaagcagtccggcaagacaatcctggatttcctgaagtccgacggcttcgccaacagaaacttcatgcagctgatccacgacgacagcctgacctttaaagaggacatccagaaagcccaggtgtccggccagggcgatagcctgcacgagcacattgccaatctggccggcagccccgccattaagaagggcatcctgcagacagtgaaggtggtggacgagctcgtgaaagtgatgggccggcacaagcccgagaacatcgtgatcgaaatggccagagagaaccagaccacccagaagggacagaagaacagccgcgagagaatgaagcggatcgaagagggcatcaaagagctgggcagccagatcctgaaagaacaccccgtggaaaacacccagctgcagaacgagaagctgtacctgtactacctgcagaatgggcgggatatgtacgtggaccaggaactggacatcaaccggctgtccgactacgatgtggacgctatcgtgcctcagagctttctgaaggacgactccatcgacaacaaggtgctgaccagaagcgacaagaaccggggcaagagcgacaacgtgccctccgaagaggtcgtgaagaagatgaagaactactggcggcagctgctgaacgccaagctgattacccagagaaagttcgacaatctgaccaaggccgagagaggcggcctgagcgaactggataaggccggcttcatcaagagacagctggtggaaacccggcagatcacaaagcacgtggcacagatcctggactcccggatgaacactaagtacgacgagaatgacaagctgatccgggaagtgaaagtgatcaccctgaagtccaagctggtgtccgatttccggaaggatttccagttttacaaagtgcgcgagatcaacaactaccaccacgcccacgacgcctacctgaacgccgtcgtgggaaccgccctgatcaaaaagtaccctaagctggaaagcgagttcgtgtacggcgactacaaggtgtacgacgtgcggaagatgatcgccaagagcgagcaggaaatcggcaaggctaccgccaagtacttcttctacagcaacatcatgaactttttcaagaccgagattaccctggccaacggcgagatccggaagcggcctctgatcgagacaaacggcgaaaccggggagatcgtgtgggataagggccgggattttgccaccgtgcggaaagtgctgagcatgccccaagtgaatatcgtgaaaaagaccgaggtgcagacaggcggcttcagcaaagagtctatcctgcccaagaggaacagcgataagctgatcgccagaaagaaggactgggaccctaagaagtacggcggcttcgacagccccaccgtggcctattctgtgctggtggtggccaaagtggaaaagggcaagtccaagaaactgaagagtgtgaaagagctgctggggatcaccatcatggaaagaagcagcttcgagaagaatcccatcgactttctggaagccaagggctacaaagaagtgaaaaaggacctgatcatcaagctgcctaagtactccctgttcgagctggaaaacggccggaagagaatgctggcctctgccggcgaactgcagaagggaaacgaactggccctgccctccaaatatgtgaacttcctgtacctggccagccactatgagaagctgaagggctcccccgaggataatgagcagaaacagctgtttgtggaacagcacaagcactacctggacgagatcatcgagcagatcagcgagttctccaagagagtgatcctggccgacgctaatctggacaaagtgctgtccgcctacaacaagcaccgggataagcccatcagagagcaggccgagaatatcatccacctgtttaccctgaccaatctgggagcccctgccgccttcaagtactttgacaccaccatcgaccggaagaggtacaccagcaccaaagaggtgctggacgccaccctgatccaccagagcatcaccggcctgtacgagacacggatcgacctgtctcagctgggaggtgactccggcggaagcagcggaggcagctctggctctgaaacccctggcaccagcgaatctgccacaccagagtctagcggcagcgagacacccggcaccagcgagagcgccacccctgagagcagcggcggctcctccggcggaagcaccctgaacatcgaggacgagtacaggctgcacgagaccagcaaggagcccgacgtgagcctgggcagcacctggctgagcgatttccctcaggcttgggccgagaccggcggcatgggcctggccgtgcggcaggcccccctgattatccccctgaaggccaccagcacccccgtgagcatcaagcagtacccaatgtcccaggaggccaggctgggcatcaagcctcacatccagaggctgctggaccagggcatcctggtgccatgccagtccccctggaacacccctctgctgcccgtgaagaagcctggcaccaacgactaccggcccgtgcaggacctgagagaagtgaacaagcgggtggaggacatccacccaaccgtgcccaacccttacaacctgctgtccggcctgccccccagccaccagtggtacaccgtgctggacctgaaggacgccttcttctgcctgagactgcaccccacctctcagcccctgttcgccttcgagtggcgcgaccccgagatgggcatcagcggccagctgacctggaccagactgccacagggctttaagaatagcccaaccctgtttaacgaggccctgcacagggacctggccgacttcaggatccagcaccccgacctgattctgctgcagtacgtggacgacctgctgctggccgctaccagcgagctggactgccagcagggcaccagagccctgctgcagaccctgggcaacctgggctacagagccagcgccaagaaggcccagatctgtcagaagcaggtgaagtatctgggctacctgctgaaggaaggccagagatggctgaccgaggccagaaaggagactgtgatgggccagcccacccccaagacccccaggcagctgcgggagttcctgggcaaggccggcttttgcagactgtttatccctggcttcgccgagatggccgccccactgtaccctctgaccaagcctggcaccctgtttaactggggccccgaccagcagaaggcctaccaggagatcaagcaggccctgctgaccgcccccgccctgggcctgcccgacctgaccaagcctttcgagctgttcgtggacgagaagcagggatacgccaaaggcgtgctgacccagaagctgggcccctggcggaggcccgtggcctacctgagcaaaaaactggaccctgtggccgccggctggcccccatgcctgcggatggtggccgccatcgctgtgctgaccaaggacgccggcaagctgaccatgggccagcccctggtgatcctggcccctcacgccgtggaggctctggtgaagcagcctccagacaggtggctgtccaacgccaggatgacccactaccaggccctgctgctggacaccgaccgggtgcagttcggccctgtggtggccctgaaccccgccaccctgctgcctctgccagaggagggcctgcagcacaactgcctggacatcctggccgaggcccacggc

SEQ ID NO: 233 - DNA, 6351 bp, synthetic construct
  misc_feature 1..6351: note = Description of Artificial Sequence: Synthetic polynucleotide
  source 1..6351: mol_type = other DNA
atgaaacggacagccgacggaagcgagttcgagtcaccaaagaagaagcggaaagtcgacaagaagtacagcatcggcctggacatcggcaccaactctgtgggctgggccgtgatcaccgacgagtacaaggtgcccagcaagaaattcaaggtgctgggcaacaccgaccggcacagcatcaagaagaacctgatcggagccctgctgttcgacagcggcgaaacagccgaggccacccggctgaagagaaccgccagaagaagatacaccagacggaagaaccggatctgctatctgcaagagatcttcagcaacgagatggccaaggtggacgacagcttcttccacagactggaagagtccttcctggtggaagaggataagaagcacgagcggcaccccatcttcggcaacatcgtggacgaggtggcctaccacgagaagtaccccaccatctaccacctgagaaagaaactggtggacagcaccgacaaggccgacctgcggctgatctatctggccctggcccacatgatcaagttccggggccacttcctgatcgagggcgacctgaaccccgacaacagcgacgtggacaagctgttcatccagctggtgcagacctacaaccagctgttcgaggaaaaccccatcaacgccagcggcgtggacgccaaggccatcctgtctgccagactgagcaagagcagacggctggaaaatctgatcgcccagctgcccggcgagaagaagaatggcctgttcggaaacctgattgccctgagcctgggcctgacccccaacttcaagagcaacttcgacctggccgaggatgccaaactgcagctgagcaaggacacctacgacgacgacctggacaacctgctggcccagatcggcgaccagtacgccgacctgtttctggccgccaagaacctgtccgacgccatcctgctgagcgacatcctgagagtgaacaccgagatcaccaaggcccccctgagcgcctctatgatcaagagatacgacgagcaccaccaggacctgaccctgctgaaagctctcgtgcggcagcagctgcctgagaagtacaaagagattttcttcgaccagagcaagaacggctacgccggctacattgacggcggagccagccaggaagagttctacaagttcatcaagcccatcctggaaaagatggacggcaccgaggaactgctcgtgaagctgaacagagaggacctgctgcggaagcagcggaccttcgacaacggcagcatcccccaccagatccacctgggagagctgcacgccattctgcggcggcaggaagatttttacccattcctgaaggacaaccgggaaaagatcgagaagatcctgaccttccgcatcccctactacgtgggccctctggccaggggaaacagcagattcgcctggatgaccagaaagagcgaggaaaccatcaccccctggaacttcgaggaagtggtggacaagggcgcttccgcccagagcttcatcgagcggatgaccaacttcgataagaacctgcccaacgagaaggtgctgcccaagcacagcctgctgtacgagtacttcaccgtgtataacgagctgaccaaagtgaaatacgtgaccgagggaatgagaaagcccgccttcctgagcggcgagcagaaaaaggccatcgtggacctgctgttcaagaccaaccggaaagtgaccgtgaagcagctgaaagaggactacttcaagaaaatcgagtgcttcgactccgtggaaatctccggcgtggaagatcggttcaacgcctccctgggcacataccacgatctgctgaaaattatcaaggacaaggacttcctggacaatgaggaaaacgaggacattctggaagatatcgtgctgaccctgacactgtttgaggacagagagatgatcgaggaacggctgaaaacctatgcccacctgttcgacgacaaagtgatgaagcagctgaagcggcggagatacaccggctggggcaggctgagccggaagctgatcaacggcatccgggacaagcagtccggcaagacaatcctggatttcctgaagtccgacggcttcgccaacagaaacttcatgcagctgatccacgacgacagcctgacctttaaagaggacatccagaaagcccaggtgtccggccagggcgatagcctgcacgagcacattgccaatctggccggcagccccgccattaagaagggcatcctgcagacagtgaaggtggtggacgagctcgtgaaagtgatgggccggcacaagcccgagaacatcgtgatcgaaatggccagagagaaccagaccacccagaagggacagaagaacagccgcgagagaatgaagcggatcgaagagggcatcaaagagctgggcagccagatcctgaaagaacaccccgtggaaaacacccagctgcagaacgagaagctgtacctgtactacctgcagaatgggcgggatatgtacgtggaccaggaactggacatcaaccggctgtccgactacgatgtggacgctatcgtgcctcagagctttctgaaggacgactccatcgacaacaaggtgctgaccagaagcgacaagaaccggggcaagagcgacaacgtgccctccgaagaggtcgtgaagaagatgaagaactactggcggcagctgctgaacgccaagctgattacccagagaaagttcgacaatctgaccaaggccgagagaggcggcctgagcgaactggataaggccggcttcatcaagagacagctggtggaaacccggcagatcacaaagcacgtggcacagatcctggactcccggatgaacactaagtacgacgagaatgacaagctgatccgggaagtgaaagtgatcaccctgaagtccaagctggtgtccgatttccggaaggatttccagttttacaaagtgcgcgagatcaacaactaccaccacgcccacgacgcctacctgaacgccgtcgtgggaaccgccctgatcaaaaagtaccctaagctggaaagcgagttcgtgtacggcgactacaaggtgtacgacgtgcggaagatgatcgccaagagcgagcaggaaatcggcaaggctaccgccaagtacttcttctacagcaacatcatgaactttttcaagaccgagattaccctggccaacggcgagatccggaagcggcctctgatcgagacaaacggcgaaaccggggagatcgtgtgggataagggccgggattttgccaccgtgcggaaagtgctgagcatgccccaagtgaatatcgtgaaaaagaccgaggtgcagacaggcggcttcagcaaagagtctatcctgcccaagaggaacagcgataagctgatcgccagaaagaaggactgggaccctaagaagtacggcggcttcgacagccccaccgtggcctattctgtgctggtggtggccaaagtggaaaagggcaagtccaagaaactgaagagtgtgaaagagctgctggggatcaccatcatggaaagaagcagcttcgagaagaatcccatcgactttctggaagccaagggctacaaagaagtgaaaaaggacctgatcatcaagctgcctaagtactccctgttcgagctggaaaacggccggaagagaatgctggcctctgccggcgaactgcagaagggaaacgaactggccctgccctccaaatatgtgaacttcctgtacctggccagccactatgagaagctgaagggctcccccgaggataatgagcagaaacagctgtttgtggaacagcacaagcactacctggacgagatcatcgagcagatcagcgagttctccaagagagtgatcctggccgacgctaatctggacaaagtgctgtccgcctacaacaagcaccgggataagcccatcagagagcaggccgagaatatcatccacctgtttaccctgaccaatctgggagcccctgccgccttcaagtactttgacaccaccatcgaccggaagaggtacaccagcaccaaagaggtgctggacgccaccctgatccaccagagcatcaccggcctgtacgagacacggatcgacctgtctcagctgggaggtgactccggcggctccagcggcggcagcagcggcagcgagacccccggcaccagcgagagcgccaccccagagagctccggcggcagcagcggcggcagcagcaccctgaacatcgaggacgagtacaggctgcacgagaccagcaaggagcccgacgtgagcctgggcagcacctggctgagcgatttccctcaggcttgggccgagaccggcggcatgggcctggccgtgcggcaggcccccctgattatccccctgaaggccaccagcacccccgtgagcatcaagcagtacccaatgtcccaggaggccaggctgggcatcaagcctcacatccagaggctgctggaccagggcatcctggtgccatgccagtccccctggaacacccctctgctgcccgtgaagaagcctggcaccaacgactaccggcccgtgcaggacctgagagaagtgaacaagcgggtggaggacatccacccaaccgtgcccaacccttacaacctgctgtccggcctgccccccagccaccagtggtacaccgtgctggacctgaaggacgccttcttctgcctgagactgcaccccacctctcagcccctgttcgccttcgagtggcgcgaccccgagatgggcatcagcggccagctgacctggaccagactgccacagggctttaagaatagcccaaccctgtttaacgaggccctgcacagggacctggccgacttcaggatccagcaccccgacctgattctgctgcagtacgtggacgacctgctgctggccgctaccagcgagctggactgccagcagggcaccagagccctgctgcagaccctgggcaacctgggctacagagccagcgccaagaaggcccagatctgtcagaagcaggtgaagtatctgggctacctgctgaaggaaggccagagatggctgaccgaggccagaaaggagactgtgatgggccagcccacccccaagacccccaggcagctgcgggagttcctgggcaaggccggcttttgcagactgtttatccctggcttcgccgagatggccgccccactgtaccctctgaccaagcctggcaccctgtttaactggggccccgaccagcagaaggcctaccaggagatcaagcaggccctgctgaccgcccccgccctgggcctgcccgacctgaccaagcctttcgagctgttcgtggacgagaagcagggatacgccaaaggcgtgctgacccagaagctgggcccctggcggaggcccgtggcctacctgagcaaaaaactggaccctgtggccgccggctggcccccatgcctgcggatggtggccgccatcgctgtgctgaccaaggacgccggcaagctgaccatgggccagcccctggtgatcctggcccctcacgccgtggaggctctggtgaagcagcctccagacaggtggctgtccaacgccaggatgacccactaccaggccctgctgctggacaccgaccgggtgcagttcggccctgtggtggccctgaaccccgccaccctgctgcctctgccagaggagggcctgcagcacaactgcctggacatcctggccgaggcccacggcaccaggcccgacctgaccgaccagcccctgcctgacgccgaccacacctggtacaccgacggcagctccctgctgcaggagggccagaggaaggccggcgccgccgtgaccaccgagaccgaggtgatctgggccaaagccctgcctgccggcacctccgcccagcgggccgagctgatcgccctgacccaggccctgaagatggctgagggcaagaagctgaacgtgtacaccgattccagatacgccttcgccaccgcccacatccacggcgagatctacagaagaaggggctggctgacctccgagggcaaggagatcaagaacaaggacgagattctggccctgctgaaggccctgttcctgcctaagagactgagcatcatccactgtcccggccaccagaagggccacagcgccgaggccagaggcaatagaatggccgaccaggccgccagaaaggccgccatcaccgagacccccgacaccagcaccctgctgatcgagaacagcagccccagcggcggctccaaacgcaccgccgacgggagcgagttcgagcccaagaagaagaggaaagtc

SEQ ID NO: 234 - RNA, 6351 nt, synthetic construct
  misc_feature 1..6351: note = Description of Artificial Sequence: Synthetic polynucleotide
  source 1..6351: mol_type = other RNA
atgaaacggacagccgacggaagcgagttcgagtcaccaaagaagaagcggaaagtcgacaagaagtacagcatcggcctggacatcggcaccaactctgtgggctgggccgtgatcaccgacgagtacaaggtgcccagcaagaaattcaaggtgctgggcaacaccgaccggcacagcatcaagaagaacctgatcggagccctgctgttcgacagcggcgaaacagccgaggccacccggctgaagagaaccgccagaagaagatacaccagacggaagaaccggatctgctatctgcaagagatcttcagcaacgagatggccaaggtggacgacagcttcttccacagactggaagagtccttcctggtggaagaggataagaagcacgagcggcaccccatcttcggcaacatcgtggacgaggtggcctaccacgagaagtaccccaccatctaccacctgagaaagaaactggtggacagcaccgacaaggccgacctgcggctgatctatctggccctggcccacatgatcaagttccggggccacttcctgatcgagggcgacctgaaccccgacaacagcgacgtggacaagctgttcatccagctggtgcagacctacaaccagctgttcgaggaaaaccccatcaacgccagcggcgtggacgccaaggccatcctgtctgccagactgagcaagagcagacggctggaaaatctgatcgcccagctgcccggcgagaagaagaatggcctgttcggaaacctgattgccctgagcctgggcctgacccccaacttcaagagcaacttcgacctggccgaggatgccaaactgcagctgagcaaggacacctacgacgacgacctggacaacctgctggcccagatcggcgaccagtacgccgacctgtttctggccgccaagaacctgtccgacgccatcctgctgagcgacatcctgagagtgaacaccgagatcaccaaggcccccctgagcgcctctatgatcaagagatacgacgagcaccaccaggacctgaccctgctgaaagctctcgtgcggcagcagctgcctgagaagtacaaagagattttcttcgaccagagcaagaacggctacgccggctacattgacggcggagccagccaggaagagttctacaagttcatcaagcccatcctggaaaagatggacggcaccgaggaactgctcgtgaagctgaacagagaggacctgctgcggaagcagcggaccttcgacaacggcagcatcccccaccagatccacctgggagagctgcacgccattctgcggcggcaggaagatttttacccattcctgaaggacaaccgggaaaagatcgagaagatcctgaccttccgcatcccctactacgtgggccctctggccaggggaaacagcagattcgcctggatgaccagaaagagcgaggaaaccatcaccccctggaacttcgaggaagtggtggacaagggcgcttccgcccagagcttcatcgagcggatgaccaacttcgataagaacctgcccaacgagaaggtgctgcccaagcacagcctgctgtacgagtacttcaccgtgtataacgagctgaccaaagtgaaatacgtgaccgagggaatgagaaagcccgccttcctgagcggcgagcagaaaaaggccatcgtggacctgctgttcaagaccaaccggaaagtgaccgtgaagcagctgaaagaggactacttcaagaaaatcgagtgcttcgactccgtggaaatctccggcgtggaagatcggttcaacgcctccctgggcacataccacgatctgctgaaaattatcaaggacaaggacttcctggacaatgaggaaaacgaggacattctggaagatatcgtgctgaccctgacactgtttgaggacagagagatgatcgaggaacggctgaaaacctatgcccacctgttcgacgacaaagtgatgaagcagctgaagcggcggagatacaccggctggggcaggctgagccggaagctgatcaacggcatccgggacaagcagtccggcaagacaatcctggatttcctgaagtccgacggcttcgccaacagaaacttcatgcagctgatccacgacgacagcctgacctttaaagaggacatccagaaagcccaggtgtccggccagggcgatagcctgcacgagcacattgccaatctggccggcagccccgccattaagaagggcatcctgcagacagtgaaggtggtggacgagctcgtgaaagtgatgggccggcacaagcccgagaacatcgtgatcgaaatggccagagagaaccagaccacccagaagggacagaagaacagccgcgagagaatgaagcggatcgaagagggcatcaaagagctgggcagccagatcctgaaagaacaccccgtggaaaacacccagctgcagaacgagaagctgtacctgtactacctgcagaatgggcgggatatgtacgtggaccaggaactggacatcaaccggctgtccgactacgatgtggacgctatcgtgcctcagagctttctgaaggacgactccatcgacaacaaggtgctgaccagaagcgacaagaaccggggcaagagcgacaacgtgccctccgaagaggtcgtgaagaagatgaagaactactggcggcagctgctgaacgccaagctgattacccagagaaagttcgacaatctgaccaaggccgagagaggcggcctgagcgaactggataaggccggcttcatcaagagacagctggtggaaacccggcagatcacaaagcacgtggcacagatcctggactcccggatgaacactaagtacgacgagaatgacaagctgatccgggaagtgaaagtgatcaccctgaagtccaagctggtgtccgatttccggaaggatttccagttttacaaagtgcgcgagatcaacaactaccaccacgcccacgacgcctacctgaacgccgtcgtgggaaccgccctgatcaaaaagtaccctaagctggaaagcgagttcgtgtacggcgactacaaggtgtacgacgtgcggaagatgatcgccaagagcgagcaggaaatcggcaaggctaccgccaagtacttcttctacagcaacatcatgaactttttcaagaccgagattaccctggccaacggcgagatccggaagcggcctctgatcgagacaaacggcgaaaccggggagatcgtgtgggataagggccgggattttgccaccgtgcggaaagtgctgagcatgccccaagtgaatatcgtgaaaaagaccgaggtgcagacaggcggcttcagcaaagagtctatcctgcccaagaggaacagcgataagctgatcgccagaaagaaggactgggaccctaagaagtacggcggcttcgacagccccaccgtggcctattctgtgctggtggtggccaaagtggaaaagggcaagtccaagaaactgaagagtgtgaaagagctgctggggatcaccatcatggaaagaagcagcttcgagaagaatcccatcgactttctggaagccaagggctacaaagaagtgaaaaaggacctgatcatcaagctgcctaagtactccctgttcgagctggaaaacggccggaagagaatgctggcctctgccggcgaactgcagaagggaaacgaactggccctgccctccaaatatgtgaacttcctgtacctggccagccactatgagaagctgaagggctcccccgaggataatgagcagaaacagctgtttgtggaacagcacaagcactacctggacgagatcatcgagcagatcagcgagttctccaagagagtgatcctggccgacgctaatctggacaaagtgctgtccgcctacaacaagcaccgggataagcccatcagagagcaggccgagaatatcatccacctgtttaccctgaccaatctgggagcccctgccgccttcaagtactttgacaccaccatcgaccggaagaggtacaccagcaccaaagaggtgctggacgccaccctgatccaccagagcatcaccggcctgtacgagacacggatcgacctgtctcagctgggaggtgactccggcggctccagcggcggcagcagcggcagcgagacccccggcaccagcgagagcgccaccccagagagctccggcggcagcagcggcggcagcagcaccctgaacatcgaggacgagtacaggctgcacgagaccagcaaggagcccgacgtgagcctgggcagcacctggctgagcgatttccctcaggcttgggccgagaccggcggcatgggcctggccgtgcggcaggcccccctgattatccccctgaaggccaccagcacccccgtgagcatcaagcagtacccaatgtcccaggaggccaggctgggcatcaagcctcacatccagaggctgctggaccagggcatcctggtgccatgccagtccccctggaacacccctctgctgcccgtgaagaagcctggcaccaacgactaccggcccgtgcaggacctgagagaagtgaacaagcgggtggaggacatccacccaaccgtgcccaacccttacaacctgctgtccggcctgccccccagccaccagtggtacaccgtgctggacctgaaggacgccttcttctgcctgagactgcaccccacctctcagcccctgttcgccttcgagtggcgcgaccccgagatgggcatcagcggccagctgacctggaccagactgccacagggctttaagaatagcccaaccctgtttaacgaggccctgcacagggacctggccgacttcaggatccagcaccccgacctgattctgctgcagtacgtggacgacctgctgctggccgctaccagcgagctggactgccagcagggcaccagagccctgctgcagaccctgggcaacctgggctacagagccagcgccaagaaggcccagatctgtcagaagcaggtgaagtatctgggctacctgctgaaggaaggccagagatggctgaccgaggccagaaaggagactgtgatgggccagcccacccccaagacccccaggcagctgcgggagttcctgggcaaggccggcttttgcagactgtttatccctggcttcgccgagatggccgccccactgtaccctctgaccaagcctggcaccctgtttaactggggccccgaccagcagaaggcctaccaggagatcaagcaggccctgctgaccgcccccgccctgggcctgcccgacctgaccaagcctttcgagctgttcgtggacgagaagcagggatacgccaaaggcgtgctgacccagaagctgggcccctggcggaggcccgtggcctacctgagcaaaaaactggaccctgtggccgccggctggcccccatgcctgcggatggtggccgccatcgctgtgctgaccaaggacgccggcaagctgaccatgggccagcccctggtgatcctggcccctcacgccgtggaggctctggtgaagcagcctccagacaggtggctgtccaacgccaggatgacccactaccaggccctgctgctggacaccgaccgggtgcagttcggccctgtggtggccctgaaccccgccaccctgctgcctctgccagaggagggcctgcagcacaactgcctggacatcctggccgaggcccacggcaccaggcccgacctgaccgaccagcccctgcctgacgccgaccacacctggtacaccgacggcagctccctgctgcaggagggccagaggaaggccggcgccgccgtgaccaccgagaccgaggtgatctgggccaaagccctgcctgccggcacctccgcccagcgggccgagctgatcgccctgacccaggccctgaagatggctgagggcaagaagctgaacgtgtacaccgattccagatacgccttcgccaccgcccacatccacggcgagatctacagaagaaggggctggctgacctccgagggcaaggagatcaagaacaaggacgagattctggccctgctgaaggccctgttcctgcctaagagactgagcatcatccactgtcccggccaccagaagggccacagcgccgaggccagaggcaatagaatggccgaccaggccgccagaaaggccgccatcaccgagacccccgacaccagcaccctgctgatcgagaacagcagccccagcggcggctccaaacgcaccgccgacgggagcgagttcgagcccaagaagaagaggaaagtc

SEQ ID NO: 235 - DNA, 99 bp, synthetic construct
  misc_feature 1..99: note = Description of Artificial Sequence: Synthetic polynucleotide
  source 1..99: mol_type = other DNA
tccggcggctccagcggcggcagcagcggcagcgagacccccggcaccagcgagagcgccaccccagagagctccggcggcagcagcggcggcagcagc

SEQ ID NO: 236 - RNA, 99 nt, synthetic construct
  misc_feature 1..99: note = Description of Artificial Sequence: Synthetic polynucleotide
  source 1..99: mol_type = other RNA
tccggcggctccagcggcggcagcagcggcagcgagacccccggcaccagcgagagcgccaccccagagagctccggcggcagcagcggcggcagcagc

SEQ ID NO: 237 - DNA, 2193 bp, synthetic construct
  misc_feature 1..2193: note = Description of Artificial Sequence: Synthetic polynucleotide
  source 1..2193: mol_type = other DNA
tccggcggctccagcggcggcagcagcggcagcgagacccccggcaccagcgagagcgccaccccagagagctccggcggcagcagcggcggcagcagcaccctgaacatcgaggacgagtacaggctgcacgagaccagcaaggagcccgacgtgagcctgggcagcacctggctgagcgatttccctcaggcttgggccgagaccggcggcatgggcctggccgtgcggcaggcccccctgattatccccctgaaggccaccagcacccccgtgagcatcaagcagtacccaatgtcccaggaggccaggctgggcatcaagcctcacatccagaggctgctggaccagggcatcctggtgccatgccagtccccctggaacacccctctgctgcccgtgaagaagcctggcaccaacgactaccggcccgtgcaggacctgagagaagtgaacaagcgggtggaggacatccacccaaccgtgcccaacccttacaacctgctgtccggcctgccccccagccaccagtggtacaccgtgctggacctgaaggacgccttcttctgcctgagactgcaccccacctctcagcccctgttcgccttcgagtggcgcgaccccgagatgggcatcagcggccagctgacctggaccagactgccacagggctttaagaatagcccaaccctgtttaacgaggccctgcacagggacctggccgacttcaggatccagcaccccgacctgattctgctgcagtacgtggacgacctgctgctggccgctaccagcgagctggactgccagcagggcaccagagccctgctgcagaccctgggcaacctgggctacagagccagcgccaagaaggcccagatctgtcagaagcaggtgaagtatctgggctacctgctgaaggaaggccagagatggctgaccgaggccagaaaggagactgtgatgggccagcccacccccaagacccccaggcagctgcgggagttcctgggcaaggccggcttttgcagactgtttatccctggcttcgccgagatggccgccccactgtaccctctgaccaagcctggcaccctgtttaactggggccccgaccagcagaaggcctaccaggagatcaagcaggccctgctgaccgcccccgccctgggcctgcccgacctgaccaagcctttcgagctgttcgtggacgagaagcagggatacgccaaaggcgtgctgacccagaagctgggcccctggcggaggcccgtggcctacctgagcaaaaaactggaccctgtggccgccggctggcccccatgcctgcggatggtggccgccatcgctgtgctgaccaaggacgccggcaagctgaccatgggccagcccctggtgatcctggcccctcacgccgtggaggctctggtgaagcagcctccagacaggtggctgtccaacgccaggatgacccactaccaggccctgctgctggacaccgaccgggtgcagttcggccctgtggtggccctgaaccccgccaccctgctgcctctgccagaggagggcctgcagcacaactgcctggacatcctggccgaggcccacggcaccaggcccgacctgaccgaccagcccctgcctgacgccgaccacacctggtacaccgacggcagctccctgctgcaggagggccagaggaaggccggcgccgccgtgaccaccgagaccgaggtgatctgggccaaagccctgcctgccggcacctccgcccagcgggccgagctgatcgccctgacccaggccctgaagatggctgagggcaagaagctgaacgtgtacaccgattccagatacgccttcgccaccgcccacatccacggcgagatctacagaagaaggggctggctgacctccgagggcaaggagatcaagaacaaggacgagattctggccctgctgaaggccctgttcctgcctaagagactgagcatcatccactgtcccggccaccagaagggccacagcgccgaggccagaggcaatagaatggccgaccaggccgccagaaaggccgccatcaccgagacccccgacaccagcaccctgctgatcgagaacagcagccccagcggcggctccaaacgcaccgccgacgggagcgagttcgagcccaagaagaagaggaaagtc

SEQ ID NO: 238 - RNA, 2193 nt, synthetic construct
  misc_feature 1..2193: note = Description of Artificial Sequence: Synthetic polynucleotide
  source 1..2193: mol_type = other RNA
tccggcggctccagcggcggcagcagcggcagcgagacccccggcaccagcgagagcgccaccccagagagctccggcggcagcagcggcggcagcagcaccctgaacatcgaggacgagtacaggctgcacgagaccagcaaggagcccgacgtgagcctgggcagcacctggctgagcgatttccctcaggcttgggccgagaccggcggcatgggcctggccgtgcggcaggcccccctgattatccccctgaaggccaccagcacccccgtgagcatcaagcagtacccaatgtcccaggaggccaggctgggcatcaagcctcacatccagaggctgctggaccagggcatcctggtgccatgccagtccccctggaacacccctctgctgcccgtgaagaagcctggcaccaacgactaccggcccgtgcaggacctgagagaagtgaacaagcgggtggaggacatccacccaaccgtgcccaacccttacaacctgctgtccggcctgccccccagccaccagtggtacaccgtgctggacctgaaggacgccttcttctgcctgagactgcaccccacctctcagcccctgttcgccttcgagtggcgcgaccccgagatgggcatcagcggccagctgacctggaccagactgccacagggctttaagaatagcccaaccctgtttaacgaggccctgcacagggacctggccgacttcaggatccagcaccccgacctgattctgctgcagtacgtggacgacctgctgctggccgctaccagcgagctggactgccagcagggcaccagagccctgctgcagaccctgggcaacctgggctacagagccagcgccaagaaggcccagatctgtcagaagcaggtgaagtatctgggctacctgctgaaggaaggccagagatggctgaccgaggccagaaaggagactgtgatgggccagcccacccccaagacccccaggcagctgcgggagttcctgggcaaggccggcttttgcagactgtttatccctggcttcgccgagatggccgccccactgtaccctctgaccaagcctggcaccctgtttaactggggccccgaccagcagaaggcctaccaggagatcaagcaggccctgctgaccgcccccgccctgggcctgcccgacctgaccaagcctttcgagctgttcgtggacgagaagcagggatacgccaaaggcgtgctgacccagaagctgggcccctggcggaggcccgtggcctacctgagcaaaaaactggaccctgtggccgccggctggcccccatgcctgcggatggtggccgccatcgctgtgctgaccaaggacgccggcaagctgaccatgggccagcccctggtgatcctggcccctcacgccgtggaggctctggtgaagcagcctccagacaggtggctgtccaacgccaggatgacccactaccaggccctgctgctggacaccgaccgggtgcagttcggccctgtggtggccctgaaccccgccaccctgctgcctctgccagaggagggcctgcagcacaactgcctggacatcctggccgaggcccacggcaccaggcccgacctgaccgaccagcccctgcctgacgccgaccacacctggtacaccgacggcagctccctgctgcaggagggccagaggaaggccggcgccgccgtgaccaccgagaccgaggtgatctgggccaaagccctgcctgccggcacctccgcccagcgggccgagctgatcgccctgacccaggccctgaagatggctgagggcaagaagctgaacgtgtacaccgattccagatacgccttcgccaccgcccacatccacggcgagatctacagaagaaggggctggctgacctccgagggcaaggagatcaagaacaaggacgagattctggccctgctgaaggccctgttcctgcctaagagactgagcatcatccactgtcccggccaccagaagggccacagcgccgaggccagaggcaatagaatggccgaccaggccgccagaaaggccgccatcaccgagacccccgacaccagcaccctgctgatcgagaacagcagccccagcggcggctccaaacgcaccgccgacgggagcgagttcgagcccaagaagaagaggaaagtc

SEQ ID NO: 239 - DNA, 63 bp, synthetic construct
  misc_feature 1..63: note = Description of Artificial Sequence: Synthetic polynucleotide
  source 1..63: mol_type = other DNA
agcggcggctccaaacgcaccgccgacgggagcgagttcgagcccaagaagaagaggaaagtc

SEQ ID NO: 240 - RNA, 63 nt, synthetic construct
  misc_feature 1..63: note = Description of Artificial Sequence: Synthetic polynucleotide
  source 1..63: mol_type = other RNA
agcggcggctccaaacgcaccgccgacgggagcgagttcgagcccaagaagaagaggaaagtc

SEQ ID NO: 241 - DNA, 6231 bp, synthetic construct
  misc_feature 1..6231: note = Description of Artificial Sequence: Synthetic polynucleotide
  source 1..6231: mol_type = other DNA
gacaagaagtacagcatcggcctggacatcggcaccaactctgtgggctgggccgtgatcaccgacgagtacaaggtgcccagcaagaaattcaaggtgctgggcaacaccgaccggcacagcatcaagaagaacctgatcggagccctgctgttcgacagcggcgaaacagccgaggccacccggctgaagagaaccgccagaagaagatacaccagacggaagaaccggatctgctatctgcaagagatcttcagcaacgagatggccaaggtggacgacagcttcttccacagactggaagagtccttcctggtggaagaggataagaagcacgagcggcaccccatcttcggcaacatcgtggacgaggtggcctaccacgagaagtaccccaccatctaccacctgagaaagaaactggtggacagcaccgacaaggccgacctgcggctgatctatctggccctggcccacatgatcaagttccggggccacttcctgatcgagggcgacctgaaccccgacaacagcgacgtggacaagctgttcatccagctggtgcagacctacaaccagctgttcgaggaaaaccccatcaacgccagcggcgtggacgccaaggccatcctgtctgccagactgagcaagagcagacggctggaaaatctgatcgcccagctgcccggcgagaagaagaatggcctgttcggaaacctgattgccctgagcctgggcctgacccccaacttcaagagcaacttcgacctggccgaggatgccaaactgcagctgagcaaggacacctacgacgacgacctggacaacctgctggcccagatcggcgaccagtacgccgacctgtttctggccgccaagaacctgtccgacgccatcctgctgagcgacatcctgagagtgaacaccgagatcaccaaggcccccctgagcgcctctatgatcaagagatacgacgagcaccaccaggacctgaccctgctgaaagctctcgtgcggcagcagctgcctgagaagtacaaagagattttcttcgaccagagcaagaacggctacgccggctacattgacggcggagccagccaggaagagttctacaagttcatcaagcccatcctggaaaagatggacggcaccgaggaactgctcgtgaagctgaacagagaggacctgctgcggaagcagcggaccttcgacaacggcagcatcccccaccagatccacctgggagagctgcacgccattctgcggcggcaggaagatttttacccattcctgaaggacaaccgggaaaagatcgagaagatcctgaccttccgcatcccctactacgtgggccctctggccaggggaaacagcagattcgcctggatgaccagaaagagcgaggaaaccatcaccccctggaacttcgaggaagtggtggacaagggcgcttccgcccagagcttcatcgagcggatgaccaacttcgataagaacctgcccaacgagaaggtgctgcccaagcacagcctgctgtacgagtacttcaccgtgtataacgagctgaccaaagtgaaatacgtgaccgagggaatgagaaagcccgccttcctgagcggcgagcagaaaaaggccatcgtggacctgctgttcaagaccaaccggaaagtgaccgtgaagcagctgaaagaggactacttcaagaaaatcgagtgcttcgactccgtggaaatctccggcgtggaagatcggttcaacgcctccctgggcacataccacgatctgctgaaaattatcaaggacaaggacttcctggacaatgaggaaaacgaggacattctggaagatatcgtgctgaccctgacactgtttgaggacagagagatgatcgaggaacggctgaaaacctatgcccacctgttcgacgacaaagtgatgaagcagctgaagcggcggagatacaccggctggggcaggctgagccggaagctgatcaacggcatccgggacaagcagtccggcaagacaatcctggatttcctgaagtccgacggcttcgccaacagaaacttcatgcagctgatccacgacgacagcctgacctttaaagaggacatccagaaagcccaggtgtccggccagggcgatagcctgcacgagcacattgccaatctggccggcagccccgccattaagaagggcatcctgcagacagtgaaggtggtggacgagctcgtgaaagtgatgggccggcacaagcccgagaacatcgtgatcgaaatggccagagagaaccagaccacccagaagggacagaagaacagccgcgagagaatgaagcggatcgaagagggcatcaaagagctgggcagccagatcctgaaagaacaccccgtggaaaacacccagctgcagaacgagaagctgtacctgtactacctgcagaatgggcgggatatgtacgtggaccaggaactggacatcaaccggctgtccgactacgatgtggacgctatcgtgcctcagagctttctgaaggacgactccatcgacaacaaggtgctgaccagaagcgacaagaaccggggcaagagcgacaacgtgccctccgaagaggtcgtgaagaagatgaagaactactggcggcagctgctgaacgccaagctgattacccagagaaagttcgacaatctgaccaaggccgagagaggcggcctgagcgaactggataaggccggcttcatcaagagacagctggtggaaacccggcagatcacaaagcacgtggcacagatcctggactcccggatgaacactaagtacgacgagaatgacaagctgatccgggaagtgaaagtgatcaccctgaagtccaagctggtgtccgatttccggaaggatttccagttttacaaagtgcgcgagatcaacaactaccaccacgcccacgacgcctacctgaacgccgtcgtgggaaccgccctgatcaaaaagtaccctaagctggaaagcgagttcgtgtacggcgactacaaggtgtacgacgtgcggaagatgatcgccaagagcgagcaggaaatcggcaaggctaccgccaagtacttcttctacagcaacatcatgaactttttcaagaccgagattaccctggccaacggcgagatccggaagcggcctctgatcgagacaaacggcgaaaccggggagatcgtgtgggataagggccgggattttgccaccgtgcggaaagtgctgagcatgccccaagtgaatatcgtgaaaaagaccgaggtgcagacaggcggcttcagcaaagagtctatcctgcccaagaggaacagcgataagctgatcgccagaaagaaggactgggaccctaagaagtacggcggcttcgacagccccaccgtggcctattctgtgctggtggtggccaaagtggaaaagggcaagtccaagaaactgaagagtgtgaaagagctgctggggatcaccatcatggaaagaagcagcttcgagaagaatcccatcgactttctggaagccaagggctacaaagaagtgaaaaaggacctgatcatcaagctgcctaagtactccctgttcgagctggaaaacggccggaagagaatgctggcctctgccggcgaactgcagaagggaaacgaactggccctgccctccaaatatgtgaacttcctgtacctggccagccactatgagaagctgaagggctcccccgaggataatgagcagaaacagctgtttgtggaacagcacaagcactacctggacgagatcatcgagcagatcagcgagttctccaagagagtgatcctggccgacgctaatctggacaaagtgctgtccgcctacaacaagcaccgggataagcccatcagagagcaggccgagaatatcatccacctgtttaccctgaccaatctgggagcccctgccgccttcaagtactttgacaccaccatcgaccggaagaggtacaccagcaccaaagaggtgctggacgccaccctgatccaccagagcatcaccggcctgtacgagacacggatcgacctgtctcagctgggaggtgactccggcggctccagcggcggcagcagcggcagcgagacccccggcaccagcgagagcgccaccccagagagctccggcggcagcagcggcggcagcagcaccctgaacatcgaggacgagtacaggctgcacgagaccagcaaggagcccgacgtgagcctgggcagcacctggctgagcgatttccctcaggcttgggccgagaccggcggcatgggcctggccgtgcggcaggcccccctgattatccccctgaaggccaccagcacccccgtgagcatcaagcagtacccaatgtcccaggaggccaggctgggcatcaagcctcacatccagaggctgctggaccagggcatcctggtgccatgccagtccccctggaacacccctctgctgcccgtgaagaagcctggcaccaacgactaccggcccgtgcaggacctgagagaagtgaacaagcgggtggaggacatccacccaaccgtgcccaacccttacaacctgctgtccggcctgccccccagccaccagtggtacaccgtgctggacctgaaggacgccttcttctgcctgagactgcaccccacctctcagcccctgttcgccttcgagtggcgcgaccccgagatgggcatcagcggccagctgacctggaccagactgccacagggctttaagaatagcccaaccctgtttaacgaggccctgcacagggacctggccgacttcaggatccagcaccccgacctgattctgctgcagtacgtggacgacctgctgctggccgctaccagcgagctggactgccagcagggcaccagagccctgctgcagaccctgggcaacctgggctacagagccagcgccaagaaggcccagatctgtcagaagcaggtgaagtatctgggctacctgctgaaggaaggccagagatggctgaccgaggccagaaaggagactgtgatgggccagcccacccccaagacccccaggcagctgcgggagttcctgggcaaggccggcttttgcagactgtttatccctggcttcgccgagatggccgccccactgtaccctctgaccaagcctggcaccctgtttaactggggccccgaccagcagaaggcctaccaggagatcaagcaggccctgctgaccgcccccgccctgggcctgcccgacctgaccaagcctttcgagctgttcgtggacgagaagcagggatacgccaaaggcgtgctgacccagaagctgggcccctggcggaggcccgtggcctacctgagcaaaaaactggaccctgtggccgccggctggcccccatgcctgcggatggtggccgccatcgctgtgctgaccaaggacgccggcaagctgaccatgggccagcccctggtgatcctggcccctcacgccgtggaggctctggtgaagcagcctccagacaggtggctgtccaacgccaggatgacccactaccaggccctgctgctggacaccgaccgggtgcagttcggccctgtggtggccctgaaccccgccaccctgctgcctctgccagaggagggcctgcagcacaactgcctggacatcctggccgaggcccacggcaccaggcccgacctgaccgaccagcccctgcctgacgccgaccacacctggtacaccgacggcagctccctgctgcaggagggccagaggaaggccggcgccgccgtgaccaccgagaccgaggtgatctgggccaaagccctgcctgccggcacctccgcccagcgggccgagctgatcgccctgacccaggccctgaagatggctgagggcaagaagctgaacgtgtacaccgattccagatacgccttcgccaccgcccacatccacggcgagatctacagaagaaggggctggctgacctccgagggcaaggagatcaagaacaaggacgagattctggccctgctgaaggccctgttcctgcctaagagactgagcatcatccactgtcccggccaccagaagggccacagcgccgaggccagaggcaatagaatggccgaccaggccgccagaaaggccgccatcaccgagacccccgacaccagcaccctgctgatcgagaacagcagcccc

SEQ ID NO: 242 - RNA, 6231 nt, synthetic construct
  misc_feature 1..6231: note = Description of Artificial Sequence: Synthetic polynucleotide
  source 1..6231: mol_type = other RNA
gacaagaagtacagcatcggcctggacatcggcaccaactctgtgggctgggccgtgatcaccgacgagtacaaggtgcccagcaagaaattcaaggtgctgggcaacaccgaccggcacagcatcaagaagaacctgatcggagccctgctgttcgacagcggcgaaacagccgaggccacccggctgaagagaaccgccagaagaagatacaccagacggaagaaccggatctgctatctgcaagagatcttcagcaacgagatggccaaggtggacgacagcttcttccacagactggaagagtccttcctggtggaagaggataagaagcacgagcggcaccccatcttcggcaacatcgtggacgaggtggcctaccacgagaagtaccccaccatctaccacctgagaaagaaactggtggacagcaccgacaaggccgacctgcggctgatctatctggccctggcccacatgatcaagttccggggccacttcctgatcgagggcgacctgaaccccgacaacagcgacgtggacaagctgttcatccagctggtgcagacctacaaccagctgttcgaggaaaaccccatcaacgccagcggcgtggacgccaaggccatcctgtctgccagactgagcaagagcagacggctggaaaatctgatcgcccagctgcccggcgagaagaagaatggcctgttcggaaacctgattgccctgagcctgggcctgacccccaacttcaagagcaacttcgacctggccgaggatgccaaactgcagctgagcaaggacacctacgacgacgacctggacaacctgctggcccagatcggcgaccagtacgccgacctgtttctggccgccaagaacctgtccgacgccatcctgctgagcgacatcctgagagtgaacaccgagatcaccaaggcccccctgagcgcctctatgatcaagagatacgacgagcaccaccaggacctgaccctgctgaaagctctcgtgcggcagcagctgcctgagaagtacaaagagattttcttcgaccagagcaagaacggctacgccggctacattgacggcggagccagccaggaagagttctacaagttcatcaagcccatcctggaaaagatggacggcaccgaggaactgctcgtgaagctgaacagagaggacctgctgcggaagcagcggaccttcgacaacggcagcatcccccaccagatccacctgggagagctgcacgccattctgcggcggcaggaagatttttacccattcctgaaggacaaccgggaaaagatcgagaagatcctgaccttccgcatcccctactacgtgggccctctggccaggggaaacagcagattcgcctggatgaccagaaagagcgaggaaaccatcaccccctggaacttcgaggaagtggtggacaagggcgcttccgcccagagcttcatcgagcggatgaccaacttcgataagaacctgcccaacgagaaggtgctgcccaagcacagcctgctgtacgagtacttcaccgtgtataacgagctgaccaaagtgaaatacgtgaccgagggaatgagaaagcccgccttcctgagcggcgagcagaaaaaggccatcgtggacctgctgttcaagaccaaccggaaagtgaccgtgaagcagctgaaagaggactacttcaagaaaatcgagtgcttcgactccgtggaaatctccggcgtggaagatcggttcaacgcctccctgggcacataccacgatctgctgaaaattatcaaggacaaggacttcctggacaatgaggaaaacgaggacattctggaagatatcgtgctgaccctgacactgtttgaggacagagagatgatcgaggaacggctgaaaacctatgcccacctgttcgacgacaaagtgatgaagcagctgaagcggcggagatacaccggctggggcaggctgagccggaagctgatcaacggcatccgggacaagcagtccggcaagacaatcctggatttcctgaagtccgacggcttcgccaacagaaacttcatgcagctgatccacgacgacagcctgacctttaaagaggacatccagaaagcccaggtgtccggccagggcgatagcctgcacgagcacattgccaatctggccggcagccccgccattaagaagggcatcctgcagacagtgaaggtggtggacgagctcgtgaaagtgatgggccggcacaagcccgagaacatcgtgatcgaaatggccagagagaaccagaccacccagaagggacagaagaacagccgcgagagaatgaagcggatcgaagagggcatcaaagagctgggcagccagatcctgaaagaacaccccgtggaaaacacccagctgcagaacgagaagctgtacctgtactacctgcagaatgggcgggatatgtacgtggaccaggaactggacatcaaccggctgtccgactacgatgtggacgctatcgtgcctcagagctttctgaaggacgactccatcgacaacaaggtgctgaccagaagcgacaagaaccggggcaagagcgacaacgtgccctccgaagaggtcgtgaagaagatgaagaactactggcggcagctgctgaacgccaagctgattacccagagaaagttcgacaatctgaccaaggccgagagaggcggcctgagcgaactggataaggccggcttcatcaagagacagctggtggaaacccggcagatcacaaagcacgtggcacagatcctggactcccggatgaacactaagtacgacgagaatgacaagctgatccgggaagtgaaagtgatcaccctgaagtccaagctggtgtccgatttccggaaggatttccagttttacaaagtgcgcgagatcaacaactaccaccacgcccacgacgcctacctgaacgccgtcgtgggaaccgccctgatcaaaaagtaccctaagctggaaagcgagttcgtgtacggcgactacaaggtgtacgacgtgcggaagatgatcgccaagagcgagcaggaaatcggcaaggctaccgccaagtacttcttctacagcaacatcatgaactttttcaagaccgagattaccctggccaacggcgagatccggaagcggcctctgatcgagacaaacggcgaaaccggggagatcgtgtgggataagggccgggattttgccaccgtgcggaaagtgctgagcatgccccaagtgaatatcgtgaaaaagaccgaggtgcagacaggcggcttcagcaaagagtctatcctgcccaagaggaacagcgataagctgatcgccagaaagaaggactgggaccctaagaagtacggcggcttcgacagccccaccgtggcctattctgtgctggtggtggccaaagtggaaaagggcaagtccaagaaactgaagagtgtgaaagagctgctggggatcaccatcatggaaagaagcagcttcgagaagaatcccatcgactttctggaagccaagggctacaaagaagtgaaaaaggacctgatcatcaagctgcctaagtactccctgttcgagctggaaaacggccggaagagaatgctggcctctgccggcgaactgcagaagggaaacgaactggccctgccctccaaatatgtgaacttcctgtacctggccagccactatgagaagctgaagggctcccccgaggataatgagcagaaacagctgtttgtggaacagcacaagcactacctggacgagatcatcgagcagatcagcgagttctccaagagagtgatcctggccgacgctaatctggacaaagtgctgtccgcctacaacaagcaccgggataagcccatcagagagcaggccgagaatatcatccacctgtttaccctgaccaatctgggagcccctgccgccttcaagtactttgacaccaccatcgaccggaagaggtacaccagcaccaaagaggtgctggacgccaccctgatccaccagagcatcaccggcctgtacgagacacggatcgacctgtctcagctgggaggtgactccggcggctccagcggcggcagcagcggcagcgagacccccggcaccagcgagagcgccaccccagagagctccggcggcagcagcggcggcagcagcaccctgaacatcgaggacgagtacaggctgcacgagaccagcaaggagcccgacgtgagcctgggcagcacctggctgagcgatttccctcaggcttgggccgagaccggcggcatgggcctggccgtgcggcaggcccccctgattatccccctgaaggccaccagcacccccgtgagcatcaagcagtacccaatgtcccaggaggccaggctgggcatcaagcctcacatccagaggctgctggaccagggcatcctggtgccatgccagtccccctggaacacccctctgctgcccgtgaagaagcctggcaccaacgactaccggcccgtgcaggacctgagagaagtgaacaagcgggtggaggacatccacccaaccgtgcccaacccttacaacctgctgtccggcctgccccccagccaccagtggtacaccgtgctggacctgaaggacgccttcttctgcctgagactgcaccccacctctcagcccctgttcgccttcgagtggcgcgaccccgagatgggcatcagcggccagctgacctggaccagactgccacagggctttaagaatagcccaaccctgtttaacgaggccctgcacagggacctggccgacttcaggatccagcaccccgacctgattctgctgcagtacgtggacgacctgctgctggccgctaccagcgagctggactgccagcagggcaccagagccctgctgcagaccctgggcaacctgggctacagagccagcgccaagaaggcccagatctgtcagaagcaggtgaagtatctgggctacctgctgaaggaaggccagagatggctgaccgaggccagaaaggagactgtgatgggccagcccacccccaagacccccaggcagctgcgggagttcctgggcaaggccggcttttgcagactgtttatccctggcttcgccgagatggccgccccactgtaccctctgaccaagcctggcaccctgtttaactggggccccgaccagcagaaggcctaccaggagatcaagcaggccctgctgaccgcccccgccctgggcctgcccgacctgaccaagcctttcgagctgttcgtggacgagaagcagggatacgccaaaggcgtgctgacccagaagctgggcccctggcggaggcccgtggcctacctgagcaaaaaactggaccctgtggccgccggctggcccccatgcctgcggatggtggccgccatcgctgtgctgaccaaggacgccggcaagctgaccatgggccagcccctggtgatcctggcccctcacgccgtggaggctctggtgaagcagcctccagacaggtggctgtccaacgccaggatgacccactaccaggccctgctgctggacaccgaccgggtgcagttcggccctgtggtggccctgaaccccgccaccctgctgcctctgccagaggagggcctgcagcacaactgcctggacatcctggccgaggcccacggcaccaggcccgacctgaccgaccagcccctgcctgacgccgaccacacctggtacaccgacggcagctccctgctgcaggagggccagaggaaggccggcgccgccgtgaccaccgagaccgaggtgatctgggccaaagccctgcctgccggcacctccgcccagcgggccgagctgatcgccctgacccaggccctgaagatggctgagggcaagaagctgaacgtgtacaccgattccagatacgccttcgccaccgcccacatccacggcgagatctacagaagaaggggctggctgacctccgagggcaaggagatcaagaacaaggacgagattctggccctgctgaaggccctgttcctgcctaagagactgagcatcatccactgtcccggccaccagaagggccacagcgccgaggccagaggcaatagaatggccgaccaggccgccagaaaggccgccatcaccgagacccccgacaccagcaccctgctgatcgagaacagcagcccc

SEQ ID NO: 243 - DNA, 6351 bp, synthetic construct
  misc_feature 1..6351: note = Description of Artificial Sequence: Synthetic polynucleotide
  source 1..6351: mol_type = other DNA
atgaaacggacagccgacggaagcgagttcgagtcaccaaagaagaagcggaaagtcgacaagaagtacagcatcggcctggacatcggcaccaactctgtgggctgggccgtgatcaccgacgagtacaaggtgcccagcaagaaattcaaggtgctgggcaacaccgaccggcacagcatcaagaagaacctgatcggagccctgctgttcgacagcggcgaaacagccgaggccacccggctgaagagaaccgccagaagaagatacaccagacggaagaaccggatctgctatctgcaagagatcttcagcaacgagatggccaaggtggacgacagcttcttccacagactggaagagtccttcctggtggaagaggataagaagcacgagcggcaccccatcttcggcaacatcgtggacgaggtggcctaccacgagaagtaccccaccatctaccacctgagaaagaaactggtggacagcaccgacaaggccgacctgcggctgatctatctggccctggcccacatgatcaagttccggggccacttcctgatcgagggcgacctgaaccccgacaacagcgacgtggacaagctgttcatccagctggtgcagacctacaaccagctgttcgaggaaaaccccatcaacgccagcggcgtggacgccaaggccatcctgtctgccagactgagcaagagcagacggctggaaaatctgatcgcccagctgcccggcgagaagaagaatggcctgttcggaaacctgattgccctgagcctgggcctgacccccaacttcaagagcaacttcgacctggccgaggatgccaaactgcagctgagcaaggacacctacgacgacgacctggacaacctgctggcccagatcggcgaccagtacgccgacctgtttctggccgccaagaacctgtccgacgccatcctgctgagcgacatcctgagagtgaacaccgagatcaccaaggcccccctgagcgcctctatgatcaagagatacgacgagcaccaccaggacctgaccctgctgaaagctctcgtgcggcagcagctgcctgagaagtacaaagagattttcttcgaccagagcaagaacggctacgccggctacattgacggcggagccagccaggaagagttctacaagttcatcaagcccatcctggaaaagatggacggcaccgaggaactgctcgtgaagctgaacagagaggacctgctgcggaagcagcggaccttcgacaacggcagcatcccccaccagatccacctgggagagctgcacgccattctgcggcggcaggaagatttttacccattcctgaaggacaaccgggaaaagatcgagaagatcctgaccttccgcatcccctactacgtgggccctctggccaggggaaacagcagattcgcctggatgaccagaaagagcgaggaaaccatcaccccctggaacttcgaggaagtggtggacaagggcgcttccgcccagagcttcatcgagcggatgaccaacttcgataagaacctgcccaacgagaaggtgctgcccaagcacagcctgctgtacgagtacttcaccgtgtataacgagctgaccaaagtgaaatacgtgaccgagggaatgagaaagcccgccttcctgagcggcgagcagaaaaaggccatcgtggacctgctgttcaagaccaaccggaaagtgaccgtgaagcagctgaaagaggactacttcaagaaaatcgagtgcttcgactccgtggaaatctccggcgtggaagatcggttcaacgcctccctgggcacataccacgatctgctgaaaattatcaaggacaaggacttcctggacaatgaggaaaacgaggacattctggaagatatcgtgctgaccctgacactgtttgaggacagagagatgatcgaggaacggctgaaaacctatgcccacctgttcgacgacaaagtgatgaagcagctgaagcggcggagatacaccggctggggcaggctgagccggaagctgatcaacggcatccgggacaagcagtccggcaagacaatcctggatttcctgaagtccgacggcttcgccaacagaaacttcatgcagctgatccacgacgacagcctgacctttaaagaggacatccagaaagcccaggtgtccggccagggcgatagcctgcacgagcacattgccaatctggccggcagccccgccattaagaagggcatcctgcagacagtgaaggtggtggacgagctcgtgaaagtgatgggccggcacaagcccgagaacatcgtgatcgaaatggccagagagaaccagaccacccagaagggacagaagaacagccgcgagagaatgaagcggatcgaagagggcatcaaagagctgggcagccagatcctgaaagaacaccccgtggaaaacacccagctgcagaacgagaagctgtacctgtactacctgcagaatgggcgggatatgtacgtggaccaggaactggacatcaaccggctgtccgactacgatgtggacgctatcgtgcctcagagctttctgaaggacgactccatcgacaacaaggtgctgaccagaagcgacaagaaccggggcaagagcgacaacgtgccctccgaagaggtcgtgaagaagatgaagaactactggcggcagctgctgaacgccaagctgattacccagagaaagttcgacaatctgaccaaggccgagagaggcggcctgagcgaactggataaggccggcttcatcaagagacagctggtggaaacccggcagatcacaaagcacgtggcacagatcctggactcccggatgaacactaagtacgacgagaatgacaagctgatccgggaagtgaaagtgatcaccctgaagtccaagctggtgtccgatttccggaaggatttccagttttacaaagtgcgcgagatcaacaactaccaccacgcccacgacgcctacctgaacgccgtcgtgggaaccgccctgatcaaaaagtaccctaagctggaaagcgagttcgtgtacggcgactacaaggtgtacgacgtgcggaagatgatcgccaagagcgagcaggaaatcggcaaggctaccgccaagtacttcttctacagcaacatcatgaactttttcaagaccgagattaccctggccaacggcgagatccggaagcggcctctgatcgagacaaacggcgaaaccggggagatcgtgtgggataagggccgggattttgccaccgtgcggaaagtgctgagcatgccccaagtgaatatcgtgaaaaagaccgaggtgcagacaggcggcttcagcaaagagtctatcctgcccaagaggaacagcgataagctgatcgccagaaagaaggactgggaccctaagaagtacggcggcttcgacagccccaccgtggcctattctgtgctggtggtggccaaagtggaaaagggcaagtccaagaaactgaagagtgtgaaagagctgctggggatcaccatcatggaaagaagcagcttcgagaagaatcccatcgactttctggaagccaagggctacaaagaagtgaaaaaggacctgatcatcaagctgcctaagtactccctgttcgagctggaaaacggccggaagagaatgctggcctctgccggcgaactgcagaagggaaacgaactggccctgccctccaaatatgtgaacttcctgtacctggccagccactatgagaagctgaagggctcccccgaggataatgagcagaaacagctgtttgtggaacagcacaagcactacctggacgagatcatcgagcagatcagcgagttctccaagagagtgatcctggccgacgctaatctggacaaagtgctgtccgcctacaacaagcaccgggataagcccatcagagagcaggccgagaatatcatccacctgtttaccctgaccaatctgggagcccctgccgccttcaagtactttgacaccaccatcgaccggaagaggtacaccagcaccaaagaggtgctggacgccaccctgatccaccagagcatcaccggcctgtacgagacacggatcgacctgtctcagctgggaggtgactccggcggcagcagcggaggcagcagcggctccgagacccccggcacctccgagagcgccacccccgagtccagcggcggcagctccggcggcagctccacactgaatatcgaggacgagtaccgcctgcacgagaccagcaaggagcccgacgtgtccctgggctccacctggctgagcgacttcccccaggcctgggccgagaccggcggcatgggcctggccgtgagacaggcccctctgatcatccccctgaaggccacctccacccccgtgagcatcaagcagtacccaatgtcccaggaggccaggctgggcatcaagccccacatccagcggctgctggatcagggcatcctggtgccctgtcagagcccctggaacacccccctgctgccagtgaagaagcccggcaccaacgactatcggcctgtgcaggacctgcgggaggtgaacaaacgggtggaggacatccaccccaccgtgcctaacccatacaacctgctgtccggcctgcccccaagccaccagtggtacaccgtgctggacctgaaggacgccttcttctgcctgcggctgcaccccaccagccagcccctgttcgccttcgagtggagggaccccgagatgggcatctccggccagctgacctggaccaggctgccccagggcttcaagaacagccccaccctgttcaacgaggccctgcaccgcgacctggccgattttagaatccagcaccctgacctgatcctgctgcagtacgtggacgacctgctgctggccgccaccagcgagctggactgccagcagggcaccagggccctgctgcagaccctgggcaacctgggctacagggccagcgccaagaaggcccagatctgccagaagcaggtgaagtacctgggctacctgctgaaggagggccagcggtggctgacagaggccagaaaggagaccgtgatgggccagcccacacccaagacccccaggcagctgcgggagttcctgggcaaggccggcttttgccggctgttcatccctggcttcgccgagatggccgccccactgtaccccctgaccaagcctgggaccctgttcaactggggccccgaccagcagaaggcctaccaggagatcaagcaggccctgctgaccgcccctgccctgggactgccagacctgaccaagcccttcgagctgttcgtggacgagaagcagggctacgccaagggcgtgctgacacagaagctgggcccatggaggagacccgtggcctacctgtccaagaagctggacccagtggccgccggctggccaccctgcctgaggatggtggccgccatcgccgtgctgaccaaggatgccggcaagctgaccatgggccagcccctggtgatcctggcccctcacgccgtggaggccctggtgaagcagccccccgacaggtggctgagcaacgccaggatgacccactaccaggccctgctgctggacaccgacagggtgcagttcggccctgtggtggccctgaaccccgccaccctgctgcccctgcccgaggagggcctgcagcacaattgcctggacatcctggccgaggcccacggaacccgccctgacctgaccgaccagcctctgcccgacgccgaccacacctggtataccgacggaagctccctgctgcaggagggccagaggaaggccggggccgccgtgacaaccgagaccgaggtgatctgggccaaggctctgcccgccggcaccagcgcccagcgggccgagctgatcgccctgacccaggccctgaagatggccgagggcaagaagctgaacgtgtacaccgactcccggtacgccttcgccaccgcccacatccacggcgaaatctacaggcggaggggctggctgaccagcgagggcaaggagatcaagaacaaggacgagatcctggccctgctgaaggccctgttcctgcccaagaggctgtctatcatccactgccccggccatcagaagggccacagcgccgaggccaggggcaaccggatggccgaccaggccgccaggaaagccgccatcaccgagacacccgatacctccaccctgctgatcgagaacagcagcccctccggcggaagcaagcgcaccgccgacggcagcgagttcgagcccaagaagaagaggaaagtc

SEQ ID NO: 244 - RNA, 6351 nt, synthetic construct
  misc_feature 1..6351: note = Description of Artificial Sequence: Synthetic polynucleotide
  source 1..6351: mol_type = other RNA
atgaaacggacagccgacggaagcgagttcgagtcaccaaagaagaagcggaaagtcgacaagaagtacagcatcggcctggacatcggcaccaactctgtgggctgggccgtgatcaccgacgagtacaaggtgcccagcaagaaattcaaggtgctgggcaacaccgaccggcacagcatcaagaagaacctgatcggagccctgctgttcgacagcggcgaaacagccgaggccacccggctgaagagaaccgccagaagaagatacaccagacggaagaaccggatctgctatctgcaagagatcttcagcaacgagatggccaaggtggacgacagcttcttccacagactggaagagtccttcctggtggaagaggataagaagcacgagcggcaccccatcttcggcaacatcgtggacgaggtggcctaccacgagaagtaccccaccatctaccacctgagaaagaaactggtggacagcaccgacaaggccgacctgcggctgatctatctggccctggcccacatgatcaagttccggggccacttcctgatcgagggcgacctgaaccccgacaacagcgacgtggacaagctgttcatccagctggtgcagacctacaaccagctgttcgaggaaaaccccatcaacgccagcggcgtggacgccaaggccatcctgtctgccagactgagcaagagcagacggctggaaaatctgatcgcccagctgcccggcgagaagaagaatggcctgttcggaaacctgattgccctgagcctgggcctgacccccaacttcaagagcaacttcgacctggccgaggatgccaaactgcagctgagcaaggacacctacgacgacgacctggacaacctgctggcccagatcggcgaccagtacgccgacctgtttctggccgccaagaacctgtccgacgccatcctgctgagcgacatcctgagagtgaacaccgagatcaccaaggcccccctgagcgcctctatgatcaagagatacgacgagcaccaccaggacctgaccctgctgaaagctctcgtgcggcagcagctgcctgagaagtacaaagagattttcttcgaccagagcaagaacggctacgccggctacattgacggcggagccagccaggaagagttctacaagttcatcaagcccatcctggaaaagatggacggcaccgaggaactgctcgtgaagctgaacagagaggacctgctgcggaagcagcggaccttcgacaacggcagcatcccccaccagatccacctgggagagctgcacgccattctgcggcggcaggaagatttttacccattcctgaaggacaaccgggaaaagatcgagaagatcctgaccttccgcatcccctactacgtgggccctctggccaggggaaacagcagattcgcctggatgaccagaaagagcgaggaaaccatcaccccctggaacttcgaggaagtggtggacaagggcgcttccgcccagagcttcatcgagcggatgaccaacttcgataagaacctgcccaacgagaaggtgctgcccaagcacagcctgctgtacgagtacttcaccgtgtataacgagctgaccaaagtgaaatacgtgaccgagggaatgagaaagcccgccttcctgagcggcgagcagaaaaaggccatcgtggacctgctgttcaagaccaaccggaaagtgaccgtgaagcagctgaaagaggactacttcaagaaaatcgagtgcttcgactccgtggaaatctccggcgtggaagatcggttcaacgcctccctgggcacataccacgatctgctgaaaattatcaaggacaaggacttcctggacaatgaggaaaacgaggacattctggaagatatcgtgctgaccctgacactgtttgaggacagagagatgatcgaggaacggctgaaaacctatgcccacctgttcgacgacaaagtgatgaagcagctgaagcggcggagatacaccggctggggcaggctgagccggaagctgatcaacggcatccgggacaagcagtccggcaagacaatcctggatttcctgaagtccgacggcttcgccaacagaaacttcatgcagctgatccacgacgacagcctgacctttaaagaggacatccagaaagcccaggtgtccggccagggcgatagcctgcacgagcacattgccaatctggccggcagccccgccattaagaagggcatcctgcagacagtgaaggtggtggacgagctcgtgaaagtgatgggccggcacaagcccgagaacatcgtgatcgaaatggccagagagaaccagaccacccagaagggacagaagaacagccgcgagagaatgaagcggatcgaagagggcatcaaagagctgggcagccagatcctgaaagaacaccccgtggaaaacacccagctgcagaacgagaagctgtacctgtactacctgcagaatgggcgggatatgtacgtggaccaggaactggacatcaaccggctgtccgactacgatgtggacgctatcgtgcctcagagctttctgaaggacgactccatcgacaacaaggtgctgaccagaagcgacaagaaccggggcaagagcgacaacgtgccctccgaagaggtcgtgaagaagatgaagaactactggcggcagctgctgaacgccaagctgattacccagagaaagttcgacaatctgaccaaggccgagagaggcggcctgagcgaactggataaggccggcttcatcaagagacagctggtggaaacccggcagatcacaaagcacgtggcacagatcctggactcccggatgaacactaagtacgacgagaatgacaagctgatccgggaagtgaaagtgatcaccctgaagtccaagctggtgtccgatttccggaaggatttccagttttacaaagtgcgcgagatcaacaactaccaccacgcccacgacgcctacctgaacgccgtcgtgggaaccgccctgatcaaaaagtaccctaagctggaaagcgagttcgtgtacggcgactacaaggtgtacgacgtgcggaagatgatcgccaagagcgagcaggaaatcggcaaggctaccgccaagtacttcttctacagcaacatcatgaactttttcaagaccgagattaccctggccaacggcgagatccggaagcggcctctgatcgagacaaacggcgaaaccggggagatcgtgtgggataagggccgggattttgccaccgtgcggaaagtgctgagcatgccccaagtgaatatcgtgaaaaagaccgaggtgcagacaggcggcttcagcaaagagtctatcctgcccaagaggaacagcgataagctgatcgccagaaagaaggactgggaccctaagaagtacggcggcttcgacagccccaccgtggcctattctgtgctggtggtggccaaagtggaaaagggcaagtccaagaaactgaagagtgtgaaagagctgctggggatcaccatcatggaaagaagcagcttcgagaagaatcccatcgactttctggaagccaagggctacaaagaagtgaaaaaggacctgatcatcaagctgcctaagtactccctgttcgagctggaaaacggccggaagagaatgctggcctctgccggcgaactgcagaagggaaacgaactggccctgccctccaaatatgtgaacttcctgtacctggccagccactatgagaagctgaagggctcccccgaggataatgagcagaaacagctgtttgtggaacagcacaagcactacctggacgagatcatcgagcagatcagcgagttctccaagagagtgatcctggccgacgctaatctggacaaagtgctgtccgcctacaacaagcaccgggataagcccatcagagagcaggccgagaatatcatccacctgtttaccctgaccaatctgggagcccctgccgccttcaagtactttgacaccaccatcgaccggaagaggtacaccagcaccaaagaggtgctggacgccaccctgatccaccagagcatcaccggcctgtacgagacacggatcgacctgtctcagctgggaggtgactccggcggcagcagcggaggcagcagcggctccgagacccccggcacctccgagagcgccacccccgagtccagcggcggcagctccggcggcagctccacactgaatatcgaggacgagtaccgcctgcacgagaccagcaaggagcccgacgtgtccctgggctccacctggctgagcgacttcccccaggcctgggccgagaccggcggcatgggcctggccgtgagacaggcccctctgatcatccccctgaaggccacctccacccccgtgagcatcaagcagtacccaatgtcccaggaggccaggctgggcatcaagccccacatccagcggctgctggatcagggcatcctggtgccctgtcagagcccctggaacacccccctgctgccagtgaagaagcccggcaccaacgactatcggcctgtgcaggacctgcgggaggtgaacaaacgggtggaggacatccaccccaccgtgcctaacccatacaacctgctgtccggcctgcccccaagccaccagtggtacaccgtgctggacctgaaggacgccttcttctgcctgcggctgcaccccaccagccagcccctgttcgccttcgagtggagggaccccgagatgggcatctccggccagctgacctggaccaggctgccccagggcttcaagaacagccccaccctgttcaacgaggccctgcaccgcgacctggccgattttagaatccagcaccctgacctgatcctgctgcagtacgtggacgacctgctgctggccgccaccagcgagctggactgccagcagggcaccagggccctgctgcagaccctgggcaacctgggctacagggccagcgccaagaaggcccagatctgccagaagcaggtgaagtacctgggctacctgctgaaggagggccagcggtggctgacagaggccagaaaggagaccgtgatgggccagcccacacccaagacccccaggcagctgcgggagttcctgggcaaggccggcttttgccggctgttcatccctggcttcgccgagatggccgccccactgtaccccctgaccaagcctgggaccctgttcaactggggccccgaccagcagaaggcctaccaggagatcaagcaggccctgctgaccgcccctgccctgggactgccagacctgaccaagcccttcgagctgttcgtggacgagaagcagggctacgccaagggcgtgctgacacagaagctgggcccatggaggagacccgtggcctacctgtccaagaagctggacccagtggccgccggctggccaccctgcctgaggatggtggccgccatcgccgtgctgaccaaggatgccggcaagctgaccatgggccagcccctggtgatcctggcccctcacgccgtggaggccctggtgaagcagccccccgacaggtggctgagcaacgccaggatgacccactaccaggccctgctgctggacaccgacagggtgcagttcggccctgtggtggccctgaaccccgccaccctgctgcccctgcccgaggagggcctgcagcacaattgcctggacatcctggccgaggcccacggaacccgccctgacctgaccgaccagcctctgcccgacgccgaccacacctggtataccgacggaagctccctgctgcaggagggccagaggaaggccggggccgccgtgacaaccgagaccgaggtgatctgggccaaggctctgcccgccggcaccagcgcccagcgggccgagctgatcgccctgacccaggccctgaagatggccgagggcaagaagctgaacgtgtacaccgactcccggtacgccttcgccaccgcccacatccacggcgaaatctacaggcggaggggctggctgaccagcgagggcaaggagatcaagaacaaggacgagatcctggccctgctgaaggccctgttcctgcccaagaggctgtctatcatccactgccccggccatcagaagggccacagcgccgaggccaggggcaaccggatggccgaccaggccgccaggaaagccgccatcaccgagacacccgatacctccaccctgctgatcgagaacagcagcccctccggcggaagcaagcgcaccgccgacggcagcgagttcgagcccaagaagaagaggaaagtc

SEQ ID NO: 245 - DNA, 2031 bp, synthetic construct
  misc_feature 1..2031: note = Description of Artificial Sequence: Synthetic polynucleotide
  source 1..2031: mol_type = other DNA
acactgaatatcgaggacgagtaccgcctgcacgagaccagcaaggagcccgacgtgtccctgggctccacctggctgagcgacttcccccaggcctgggccgagaccggcggcatgggcctggccgtgagacaggcccctctgatcatccccctgaaggccacctccacccccgtgagcatcaagcagtacccaatgtcccaggaggccaggctgggcatcaagccccacatccagcggctgctggatcagggcatcctggtgccctgtcagagcccctggaacacccccctgctgccagtgaagaagcccggcaccaacgactatcggcctgtgcaggacctgcgggaggtgaacaaacgggtggaggacatccaccccaccgtgcctaacccatacaacctgctgtccggcctgcccccaagccaccagtggtacaccgtgctggacctgaaggacgccttcttctgcctgcggctgcaccccaccagccagcccctgttcgccttcgagtggagggaccccgagatgggcatctccggccagctgacctggaccaggctgccccagggcttcaagaacagccccaccctgttcaacgaggccctgcaccgcgacctggccgattttagaatccagcaccctgacctgatcctgctgcagtacgtggacgacctgctgctggccgccaccagcgagctggactgccagcagggcaccagggccctgctgcagaccctgggcaacctgggctacagggccagcgccaagaaggcccagatctgccagaagcaggtgaagtacctgggctacctgctgaaggagggccagcggtggctgacagaggccagaaaggagaccgtgatgggccagcccacacccaagacccccaggcagctgcgggagttcctgggcaaggccggcttttgccggctgttcatccctggcttcgccgagatggccgccccactgtaccccctgaccaagcctgggaccctgttcaactggggccccgaccagcagaaggcctaccaggagatcaagcaggccctgctgaccgcccctgccctgggactgccagacctgaccaagcccttcgagctgttcgtggacgagaagcagggctacgccaagggcgtgctgacacagaagctgggcccatggaggagacccgtggcctacctgtccaagaagctggacccagtggccgccggctggccaccctgcctgaggatggtggccgccatcgccgtgctgaccaaggatgccggcaagctgaccatgggccagcccctggtgatcctggcccctcacgccgtggaggccctggtgaagcagccccccgacaggtggctgagcaacgccaggatgacccactaccaggccctgctgctggacaccgacagggtgcagttcggccctgtggtggccctgaaccccgccaccctgctgcccctgcccgaggagggcctgcagcacaattgcctggacatcctggccgaggcccacggaacccgccctgacctgaccgaccagcctctgcccgacgccgaccacacctggtataccgacggaagctccctgctgcaggagggccagaggaaggccggggccgccgtgacaaccgagaccgaggtgatctgggccaaggctctgcccgccggcaccagcgcccagcgggccgagctgatcgccctgacccaggccctgaagatggccgagggcaagaagctgaacgtgtacaccgactcccggtacgccttcgccaccgcccacatccacggcgaaatctacaggcggaggggctggctgaccagcgagggcaaggagatcaagaacaaggacgagatcctggccctgctgaaggccctgttcctgcccaagaggctgtctatcatccactgccccggccatcagaagggccacagcgccgaggccaggggcaaccggatggccgaccaggccgccaggaaagccgccatcaccgagacacccgatacctccaccctgctgatcgagaacagcagcccc

SEQ ID NO: 246 - RNA, 2031 nt, synthetic construct
  misc_feature 1..2031: note = Description of Artificial Sequence: Synthetic polynucleotide
  source 1..2031: mol_type = other RNA
acactgaatatcgaggacgagtaccgcctgcacgagaccagcaaggagcccgacgtgtccctgggctccacctggctgagcgacttcccccaggcctgggccgagaccggcggcatgggcctggccgtgagacaggcccctctgatcatccccctgaaggccacctccacccccgtgagcatcaagcagtacccaatgtcccaggaggccaggctgggcatcaagccccacatccagcggctgctggatcagggcatcctggtgccctgtcagagcccctggaacacccccctgctgccagtgaagaagcccggcaccaacgactatcggcctgtgcaggacctgcgggaggtgaacaaacgggtggaggacatccaccccaccgtgcctaacccatacaacctgctgtccggcctgcccccaagccaccagtggtacaccgtgctggacctgaaggacgccttcttctgcctgcggctgcaccccaccagccagcccctgttcgccttcgagtggagggaccccgagatgggcatctccggccagctgacctggaccaggctgccccagggcttcaagaacagccccaccctgttcaacgaggccctgcaccgcgacctggccgattttagaatccagcaccctgacctgatcctgctgcagtacgtggacgacctgctgctggccgccaccagcgagctggactgccagcagggcaccagggccctgctgcagaccctgggcaacctgggctacagggccagcgccaagaaggcccagatctgccagaagcaggtgaagtacctgggctacctgctgaaggagggccagcggtggctgacagaggccagaaaggagaccgtgatgggccagcccacacccaagacccccaggcagctgcgggagttcctgggcaaggccggcttttgccggctgttcatccctggcttcgccgagatggccgccccactgtaccccctgaccaagcctgggaccctgttcaactggggccccgaccagcagaaggcctaccaggagatcaagcaggccctgctgaccgcccctgccctgggactgccagacctgaccaagcccttcgagctgttcgtggacgagaagcagggctacgccaagggcgtgctgacacagaagctgggcccatggaggagacccgtggcctacctgtccaagaagctggacccagtggccgccggctggccaccctgcctgaggatggtggccgccatcgccgtgctgaccaaggatgccggcaagctgaccatgggccagcccctggtgatcctggcccctcacgccgtggaggccctggtgaagcagccccccgacaggtggctgagcaacgccaggatgacccactaccaggccctgctgctggacaccgacagggtgcagttcggccctgtggtggccctgaaccccgccaccctgctgcccctgcccgaggagggcctgcagcacaattgcctggacatcctggccgaggcccacggaacccgccctgacctgaccgaccagcctctgcccgacgccgaccacacctggtataccgacggaagctccctgctgcaggagggccagaggaaggccggggccgccgtgacaaccgagaccgaggtgatctgggccaaggctctgcccgccggcaccagcgcccagcgggccgagctgatcgccctgacccaggccctgaagatggccgagggcaagaagctgaacgtgtacaccgactcccggtacgccttcgccaccgcccacatccacggcgaaatctacaggcggaggggctggctgaccagcgagggcaaggagatcaagaacaaggacgagatcctggccctgctgaaggccctgttcctgcccaagaggctgtctatcatccactgccccggccatcagaagggccacagcgccgaggccaggggcaaccggatggccgaccaggccgccaggaaagccgccatcaccgagacacccgatacctccaccctgctgatcgagaacagcagcccc

SEQ ID NO: 247 - DNA, 99 bp, synthetic construct
  misc_feature 1..99: note = Description of Artificial Sequence: Synthetic polynucleotide
  source 1..99: mol_type = other DNA
tccggcggcagcagcggaggcagcagcggctccgagacccccggcacctccgagagcgccacccccgagtccagcggcggcagctccggcggcagctcc

SEQ ID NO: 248 - RNA, 99 nt, synthetic construct
  misc_feature 1..99: note = Description of Artificial Sequence: Synthetic polynucleotide
  source 1..99: mol_type = other RNA
tccggcggcagcagcggaggcagcagcggctccgagacccccggcacctccgagagcgccacccccgagtccagcggcggcagctccggcggcagctcc

SEQ ID NO: 249 - DNA, 2193 bp, synthetic construct
  misc_feature 1..2193: note = Description of Artificial Sequence: Synthetic polynucleotide
  source 1..2193: mol_type = other DNA
tccggcggcagcagcggaggcagcagcggctccgagacccccggcacctccgagagcgccacccccgagtccagcggcggcagctccggcggcagctccacactgaatatcgaggacgagtaccgcctgcacgagaccagcaaggagcccgacgtgtccctgggctccacctggctgagcgacttcccccaggcctgggccgagaccggcggcatgggcctggccgtgagacaggcccctctgatcatccccctgaaggccacctccacccccgtgagcatcaagcagtacccaatgtcccaggaggccaggctgggcatcaagccccacatccagcggctgctggatcagggcatcctggtgccctgtcagagcccctggaacacccccctgctgccagtgaagaagcccggcaccaacgactatcggcctgtgcaggacctgcgggaggtgaacaaacgggtggaggacatccaccccaccgtgcctaacccatacaacctgctgtccggcctgcccccaagccaccagtggtacaccgtgctggacctgaaggacgccttcttctgcctgcggctgcaccccaccagccagcccctgttcgccttcgagtggagggaccccgagatgggcatctccggccagctgacctggaccaggctgccccagggcttcaagaacagccccaccctgttcaacgaggccctgcaccgcgacctggccgattttagaatccagcaccctgacctgatcctgctgcagtacgtggacgacctgctgctggccgccaccagcgagctggactgccagcagggcaccagggccctgctgcagaccctgggcaacctgggctacagggccagcgccaagaaggcccagatctgccagaagcaggtgaagtacctgggctacctgctgaaggagggccagcggtggctgacagaggccagaaaggagaccgtgatgggccagcccacacccaagacccccaggcagctgcgggagttcctgggcaaggccggcttttgccggctgttcatccctggcttcgccgagatggccgccccactgtaccccctgaccaagcctgggaccctgttcaactggggccccgaccagcagaaggcctaccaggagatcaagcaggccctgctgaccgcccctgccctgggactgccagacctgaccaagcccttcgagctgttcgtggacgagaagcagggctacgccaagggcgtgctgacacagaagctgggcccatggaggagacccgtggcctacctgtccaagaagctggacccagtggccgccggctggccaccctgcctgaggatggtggccgccatcgccgtgctgaccaaggatgccggcaagctgaccatgggccagcccctggtgatcctggcccctcacgccgtggaggccctggtgaagcagccccccgacaggtggctgagcaacgccaggatgacccactaccaggccctgctgctggacaccgacagggtgcagttcggccctgtggtggccctgaaccccgccaccctgctgcccctgcccgaggagggcctgcagcacaattgcctggacatcctggccgaggcccacggaacccgccctgacctgaccgaccagcctctgcccgacgccgaccacacctggtataccgacggaagctccctgctgcaggagggccagaggaaggccggggccgccgtgacaaccgagaccgaggtgatctgggccaaggctctgcccgccggcaccagcgcccagcgggccgagctgatcgccctgacccaggccctgaagatggccgagggcaagaagctgaacgtgtacaccgactcccggtacgccttcgccaccgcccacatccacggcgaaatctacaggcggaggggctggctgaccagcgagggcaaggagatcaagaacaaggacgagatcctggccctgctgaaggccctgttcctgcccaagaggctgtctatcatccactgccccggccatcagaagggccacagcgccgaggccaggggcaaccggatggccgaccaggccgccaggaaagccgccatcaccgagacacccgatacctccaccctgctgatcgagaacagcagcccctccggcggaagcaagcgcaccgccgacggcagcgagttcgagcccaagaagaagaggaaagtc

SEQ ID NO: 250 - RNA, 2193 nt, synthetic construct
  misc_feature 1..2193: note = Description of Artificial Sequence: Synthetic polynucleotide
  source 1..2193: mol_type = other RNA
tccggcggcagcagcggaggcagcagcggctccgagacccccggcacctccgagagcgccacccccgagtccagcggcggcagctccggcggcagctccacactgaatatcgaggacgagtaccgcctgcacgagaccagcaaggagcccgacgtgtccctgggctccacctggctgagcgacttcccccaggcctgggccgagaccggcggcatgggcctggccgtgagacaggcccctctgatcatccccctgaaggccacctccacccccgtgagcatcaagcagtacccaatgtcccaggaggccaggctgggcatcaagccccacatccagcggctgctggatcagggcatcctggtgccctgtcagagcccctggaacacccccctgctgccagtgaagaagcccggcaccaacgactatcggcctgtgcaggacctgcgggaggtgaacaaacgggtggaggacatccaccccaccgtgcctaacccatacaacctgctgtccggcctgcccccaagccaccagtggtacaccgtgctggacctgaaggacgccttcttctgcctgcggctgcaccccaccagccagcccctgttcgccttcgagtggagggaccccgagatgggcatctccggccagctgacctggaccaggctgccccagggcttcaagaacagccccaccctgttcaacgaggccctgcaccgcgacctggccgattttagaatccagcaccctgacctgatcctgctgcagtacgtggacgacctgctgctggccgccaccagcgagctggactgccagcagggcaccagggccctgctgcagaccctgggcaacctgggctacagggccagcgccaagaaggcccagatctgccagaagcaggtgaagtacctgggctacctgctgaaggagggccagcggtggctgacagaggccagaaaggagaccgtgatgggccagcccacacccaagacccccaggcagctgcgggagttcctgggcaaggccggcttttgccggctgttcatccctggcttcgccgagatggccgccccactgtaccccctgaccaagcctgggaccctgttcaactggggccccgaccagcagaaggcctaccaggagatcaagcaggccctgctgaccgcccctgccctgggactgccagacctgaccaagcccttcgagctgttcgtggacgagaagcagggctacgccaagggcgtgctgacacagaagctgggcccatggaggagacccgtggcctacctgtccaagaagctggacccagtggccgccggctggccaccctgcctgaggatggtggccgccatcgccgtgctgaccaaggatgccggcaagctgaccatgggccagcccctggtgatcctggcccctcacgccgtggaggccctggtgaagcagccccccgacaggtggctgagcaacgccaggatgacccactaccaggccctgctgctggacaccgacagggtgcagttcggccctgtggtggccctgaaccccgccaccctgctgcccctgcccgaggagggcctgcagcacaattgcctggacatcctggccgaggcccacggaacccgccctgacctgaccgaccagcctctgcccgacgccgaccacacctggtataccgacggaagctccctgctgcaggagggccagaggaaggccggggccgccgtgacaaccgagaccgaggtgatctgggccaaggctctgcccgccggcaccagcgcccagcgggccgagctgatcgccctgacccaggccctgaagatggccgagggcaagaagctgaacgtgtacaccgactcccggtacgccttcgccaccgcccacatccacggcgaaatctacaggcggaggggctggctgaccagcgagggcaaggagatcaagaacaaggacgagatcctggccctgctgaaggccctgttcctgcccaagaggctgtctatcatccactgccccggccatcagaagggccacagcgccgaggccaggggcaaccggatggccgaccaggccgccaggaaagccgccatcaccgagacacccgatacctccaccctgctgatcgagaacagcagcccctccggcggaagcaagcgcaccgccgacggcagcgagttcgagcccaagaagaagaggaaagtc

SEQ ID NO: 251 - DNA, 63 bp, synthetic construct
  misc_feature 1..63: note = Description of Artificial Sequence: Synthetic polynucleotide
  source 1..63: mol_type = other DNA
tccggcggaagcaagcgcaccgccgacggcagcgagttcgagcccaagaagaagaggaaagtc

SEQ ID NO: 252 - RNA, 63 nt, synthetic construct
  misc_feature 1..63: note = Description of Artificial Sequence: Synthetic polynucleotide
  source 1..63: mol_type = other RNA
tccggcggaagcaagcgcaccgccgacggcagcgagttcgagcccaagaagaagaggaaagtc

SEQ ID NO: 253 - DNA, 6231 bp, synthetic construct
  misc_feature 1..6231: note = Description of Artificial Sequence: Synthetic polynucleotide
  source 1..6231: mol_type = other DNA
gacaagaagtacagcatcggcctggacatcggcaccaactctgtgggctgggccgtgatcaccgacgagtacaaggtgcccagcaagaaattcaaggtgctgggcaacaccgaccggcacagcatcaagaagaacctgatcggagccctgctgttcgacagcggcgaaacagccgaggccacccggctgaagagaaccgccagaagaagatacaccagacggaagaaccggatctgctatctgcaagagatcttcagcaacgagatggccaaggtggacgacagcttcttccacagactggaagagtccttcctggtggaagaggataagaagcacgagcggcaccccatcttcggcaacatcgtggacgaggtggcctaccacgagaagtaccccaccatctaccacctgagaaagaaactggtggacagcaccgacaaggccgacctgcggctgatctatctggccctggcccacatgatcaagttccggggccacttcctgatcgagggcgacctgaaccccgacaacagcgacgtggacaagctgttcatccagctggtgcagacctacaaccagctgttcgaggaaaaccccatcaacgccagcggcgtggacgccaaggccatcctgtctgccagactgagcaagagcagacggctggaaaatctgatcgcccagctgcccggcgagaagaagaatggcctgttcggaaacctgattgccctgagcctgggcctgacccccaacttcaagagcaacttcgacctggccgaggatgccaaactgcagctgagcaaggacacctacgacgacgacctggacaacctgctggcccagatcggcgaccagtacgccgacctgtttctggccgccaagaacctgtccgacgccatcctgctgagcgacatcctgagagtgaacaccgagatcaccaaggcccccctgagcgcctctatgatcaagagatacgacgagcaccaccaggacctgaccctgctgaaagctctcgtgcggcagcagctgcctgagaagtacaaagagattttcttcgaccagagcaagaacggctacgccggctacattgacggcggagccagccaggaagagttctacaagttcatcaagcccatcctggaaaagatggacggcaccgaggaactgctcgtgaagctgaacagagaggacctgctgcggaagcagcggaccttcgacaacggcagcatcccccaccagatccacctgggagagctgcacgccattctgcggcggcaggaagatttttacccattcctgaaggacaaccgggaaaagatcgagaagatcctgaccttccgcatcccctactacgtgggccctctggccaggggaaacagcagattcgcctggatgaccagaaagagcgaggaaaccatcaccccctggaacttcgaggaagtggtggacaagggcgcttccgcccagagcttcatcgagcggatgaccaacttcgataagaacctgcccaacgagaaggtgctgcccaagcacagcctgctgtacgagtacttcaccgtgtataacgagctgaccaaagtgaaatacgtgaccgagggaatgagaaagcccgccttcctgagcggcgagcagaaaaaggccatcgtggacctgctgttcaagaccaaccggaaagtgaccgtgaagcagctgaaagaggactacttcaagaaaatcgagtgcttcgactccgtggaaatctccggcgtggaagatcggttcaacgcctccctgggcacataccacgatctgctgaaaattatcaaggacaaggacttcctggacaatgaggaaaacgaggacattctggaagatatcgtgctgaccctgacactgtttgaggacagagagatgatcgaggaacggctgaaaacctatgcccacctgttcgacgacaaagtgatgaagcagctgaagcggcggagatacaccggctggggcaggctgagccggaagctgatcaacggcatccgggacaagcagtccggcaagacaatcctggatttcctgaagtccgacggcttcgccaacagaaacttcatgcagctgatccacgacgacagcctgacctttaaagaggacatccagaaagcccaggtgtccggccagggcgatagcctgcacgagcacattgccaatctggccggcagccccgccattaagaagggcatcctgcagacagtgaaggtggtggacgagctcgtgaaagtgatgggccggcacaagcccgagaacatcgtgatcgaaatggccagagagaaccagaccacccagaagggacagaagaacagccgcgagagaatgaagcggatcgaagagggcatcaaagagctgggcagccagatcctgaaagaacaccccgtggaaaacacccagctgcagaacgagaagctgtacctgtactacctgcagaatgggcgggatatgtacgtggaccaggaactggacatcaaccggctgtccgactacgatgtggacgctatcgtgcctcagagctttctgaaggacgactccatcgacaacaaggtgctgaccagaagcgacaagaaccggggcaagagcgacaacgtgccctccgaagaggtcgtgaagaagatgaagaactactggcggcagctgctgaacgccaagctgattacccagagaaagttcgacaatctgaccaaggccgagagaggcggcctgagcgaactggataaggccggcttcatcaagagacagctggtggaaacccggcagatcacaaagcacgtggcacagatcctggactcccggatgaacactaagtacgacgagaatgacaagctgatccgggaagtgaaagtgatcaccctgaagtccaagctggtgtccgatttccggaaggatttccagttttacaaagtgcgcgagatcaacaactaccaccacgcccacgacgcctacctgaacgccgtcgtgggaaccgccctgatcaaaaagtaccctaagctggaaagcgagttcgtgtacggcgactacaaggtgtacgacgtgcggaagatgatcgccaagagcgagcaggaaatcggcaaggctaccgccaagtacttcttctacagcaacatcatgaactttttcaagaccgagattaccctggccaacggcgagatccggaagcggcctctgatcgagacaaacggcgaaaccggggagatcgtgtgggataagggccgggattttgccaccgtgcggaaagtgctgagcatgccccaagtgaatatcgtgaaaaagaccgaggtgcagacaggcggcttcagcaaagagtctatcctgcccaagaggaacagcgataagctgatcgccagaaagaaggactgggaccctaagaagtacggcggcttcgacagccccaccgtggcctattctgtgctggtggtggccaaagtggaaaagggcaagtccaagaaactgaagagtgtgaaagagctgctggggatcaccatcatggaaagaagcagcttcgagaagaatcccatcgactttctggaagccaagggctacaaagaagtgaaaaaggacctgatcatcaagctgcctaagtactccctgttcgagctggaaaacggccggaagagaatgctggcctctgccggcgaactgcagaagggaaacgaactggccctgccctccaaatatgtgaacttcctgtacctggccagccactatgagaagctgaagggctcccccgaggataatgagcagaaacagctgtttgtggaacagcacaagcactacctggacgagatcatcgagcagatcagcgagttctccaagagagtgatcctggccgacgctaatctggacaaagtgctgtccgcctacaacaagcaccgggataagcccatcagagagcaggccgagaatatcatccacctgtttaccctgaccaatctgggagcccctgccgccttcaagtactttgacaccaccatcgaccggaagaggtacaccagcaccaaagaggtgctggacgccaccctgatccaccagagcatcaccggcctgtacgagacacggatcgacctgtctcagctgggaggtgactccggcggcagcagcggaggcagcagcggctccgagacccccggcacctccgagagcgccacccccgagtccagcggcggcagctccggcggcagctccacactgaatatcgaggacgagtaccgcctgcacgagaccagcaaggagcccgacgtgtccctgggctccacctggctgagcgacttcccccaggcctgggccgagaccggcggcatgggcctggccgtgagacaggcccctctgatcatccccctgaaggccacctccacccccgtgagcatcaagcagtacccaatgtcccaggaggccaggctgggcatcaagccccacatccagcggctgctggatcagggcatcctggtgccctgtcagagcccctggaacacccccctgctgccagtgaagaagcccggcaccaacgactatcggcctgtgcaggacctgcgggaggtgaacaaacgggtggaggacatccaccccaccgtgcctaacccatacaacctgctgtccggcctgcccccaagccaccagtggtacaccgtgctggacctgaaggacgccttcttctgcctgcggctgcaccccaccagccagcccctgttcgccttcgagtggagggaccccgagatgggcatctccggccagctgacctggaccaggctgccccagggcttcaagaacagccccaccctgttcaacgaggccctgcaccgcgacctggccgattttagaatccagcaccctgacctgatcctgctgcagtacgtggacgacctgctgctggccgccaccagcgagctggactgccagcagggcaccagggccctgctgcagaccctgggcaacctgggctacagggccagcgccaagaaggcccagatctgccagaagcaggtgaagtacctgggctacctgctgaaggagggccagcggtggctgacagaggccagaaaggagaccgtgatgggccagcccacacccaagacccccaggcagctgcgggagttcctgggcaaggccggcttttgccggctgttcatccctggcttcgccgagatggccgccccactgtaccccctgaccaagcctgggaccctgttcaactggggccccgaccagcagaaggcctaccaggagatcaagcaggccctgctgaccgcccctgccctgggactgccagacctgaccaagcccttcgagctgttcgtggacgagaagcagggctacgccaagggcgtgctgacacagaagctgggcccatggaggagacccgtggcctacctgtccaagaagctggacccagtggccgccggctggccaccctgcctgaggatggtggccgccatcgccgtgctgaccaaggatgccggcaagctgaccatgggccagcccctggtgatcctggcccctcacgccgtggaggccctggtgaagcagccccccgacaggtggctgagcaacgccaggatgacccactaccaggccctgctgctggacaccgacagggtgcagttcggccctgtggtggccctgaaccccgccaccctgctgcccctgcccgaggagggcctgcagcacaattgcctggacatcctggccgaggcccacggaacccgccctgacctgaccgaccagcctctgcccgacgccgaccacacctggtataccgacggaagctccctgctgcaggagggccagaggaaggccggggccgccgtgacaaccgagaccgaggtgatctgggccaaggctctgcccgccggcaccagcgcccagcgggccgagctgatcgccctgacccaggccctgaagatggccgagggcaagaagctgaacgtgtacaccgactcccggtacgccttcgccaccgcccacatccacggcgaaatctacaggcggaggggctggctgaccagcgagggcaaggagatcaagaacaaggacgagatcctggccctgctgaaggccctgttcctgcccaagaggctgtctatcatccactgccccggccatcagaagggccacagcgccgaggccaggggcaaccggatggccgaccaggccgccaggaaagccgccatcaccgagacacccgatacctccaccctgctgatcgagaacagcagcccc

SEQ ID NO: 254 - RNA, 6231 nt, synthetic construct
  misc_feature 1..6231: note = Description of Artificial Sequence: Synthetic polynucleotide
  source 1..6231: mol_type = other RNA
gacaagaagtacagcatcggcctggacatcggcaccaactctgtgggctgggccgtgatcaccgacgagtacaaggtgcccagcaagaaattcaaggtgctgggcaacaccgaccggcacagcatcaagaagaacctgatcggagccctgctgttcgacagcggcgaaacagccgaggccacccggctgaagagaaccgccagaagaagatacaccagacggaagaaccggatctgctatctgcaagagatcttcagcaacgagatggccaaggtggacgacagcttcttccacagactggaagagtccttcctggtggaagaggataagaagcacgagcggcaccccatcttcggcaacatcgtggacgaggtggcctaccacgagaagtaccccaccatctaccacctgagaaagaaactggtggacagcaccgacaaggccgacctgcggctgatctatctggccctggcccacatgatcaagttccggggccacttcctgatcgagggcgacctgaaccccgacaacagcgacgtggacaagctgttcatccagctggtgcagacctacaaccagctgttcgaggaaaaccccatcaacgccagcggcgtggacgccaaggccatcctgtctgccagactgagcaagagcagacggctggaaaatctgatcgcccagctgcccggcgagaagaagaatggcctgttcggaaacctgattgccctgagcctgggcctgacccccaacttcaagagcaacttcgacctggccgaggatgccaaactgcagctgagcaaggacacctacgacgacgacctggacaacctgctggcccagatcggcgaccagtacgccgacctgtttctggccgccaagaacctgtccgacgccatcctgctgagcgacatcctgagagtgaacaccgagatcaccaaggcccccctgagcgcctctatgatcaagagatacgacgagcaccaccaggacctgaccctgctgaaagctctcgtgcggcagcagctgcctgagaagtacaaagagattttcttcgaccagagcaagaacggctacgccggctacattgacggcggagccagccaggaagagttctacaagttcatcaagcccatcctggaaaagatggacggcaccgaggaactgctcgtgaagctgaacagagaggacctgctgcggaagcagcggaccttcgacaacggcagcatcccccaccagatccacctgggagagctgcacgccattctgcggcggcaggaagatttttacccattcctgaaggacaaccgggaaaagatcgagaagatcctgaccttccgcatcccctactacgtgggccctctggccaggggaaacagcagattcgcctggatgaccagaaagagcgaggaaaccatcaccccctggaacttcgaggaagtggtggacaagggcgcttccgcccagagcttcatcgagcggatgaccaacttcgataagaacctgcccaacgagaaggtgctgcccaagcacagcctgctgtacgagtacttcaccgtgtataacgagctgaccaaagtgaaatacgtgaccgagggaatgagaaagcccgccttcctgagcggcgagcagaaaaaggccatcgtggacctgctgttcaagaccaaccggaaagtgaccgtgaagcagctgaaagaggactacttcaagaaaatcgagtgcttcgactccgtggaaatctccggcgtggaagatcggttcaacgcctccctgggcacataccacgatctgctgaaaattatcaaggacaaggacttcctggacaatgaggaaaacgaggacattctggaagatatcgtgctgaccctgacactgtttgaggacagagagatgatcgaggaacggctgaaaacctatgcccacctgttcgacgacaaagtgatgaagcagctgaagcggcggagatacaccggctggggcaggctgagccggaagctgatcaacggcatccgggacaagcagtccggcaagacaatcctggatttcctgaagtccgacggcttcgccaacagaaacttcatgcagctgatccacgacgacagcctgacctttaaagaggacatccagaaagcccaggtgtccggccagggcgatagcctgcacgagcacattgccaatctggccggcagccccgccattaagaagggcatcctgcagacagtgaaggtggtggacgagctcgtgaaagtgatgggccggcacaagcccgagaacatcgtgatcgaaatggccagagagaaccagaccacccagaagggacagaagaacagccgcgagagaatgaagcggatcgaagagggcatcaaagagctgggcagccagatcctgaaagaacaccccgtggaaaacacccagctgcagaacgagaagctgtacctgtactacctgcagaatgggcgggatatgtacgtggaccaggaactggacatcaaccggctgtccgactacgatgtggacgctatcgtgcctcagagctttctgaaggacgactccatcgacaacaaggtgctgaccagaagcgacaagaaccggggcaagagcgacaacgtgccctccgaagaggtcgtgaagaagatgaagaactactggcggcagctgctgaacgccaagctgattacccagagaaagttcgacaatctgaccaaggccgagagaggcggcctgagcgaactggataaggccggcttcatcaagagacagctggtggaaacccggcagatcacaaagcacgtggcacagatcctggactcccggatgaacactaagtacgacgagaatgacaagctgatccgggaagtgaaagtgatcaccctgaagtccaagctggtgtccgatttccggaaggatttccagttttacaaagtgcgcgagatcaacaactaccaccacgcccacgacgcctacctgaacgccgtcgtgggaaccgccctgatcaaaaagtaccctaagctggaaagcgagttcgtgtacggcgactacaaggtgtacgacgtgcggaagatgatcgccaagagcgagcaggaaatcggcaaggctaccgccaagtacttcttctacagcaacatcatgaactttttcaagaccgagattaccctggccaacggcgagatccggaagcggcctctgatcgagacaaacggcgaaaccggggagatcgtgtgggataagggccgggattttgccaccgtgcggaaagtgctgagcatgccccaagtgaatatcgtgaaaaagaccgaggtgcagacaggcggcttcagcaaagagtctatcctgcccaagaggaacagcgataagctgatcgccagaaagaaggactgggaccctaagaagtacggcggcttcgacagccccaccgtggcctattctgtgctggtggtggccaaagtggaaaagggcaagtccaagaaactgaagagtgtgaaagagctgctggggatcaccatcatggaaagaagcagcttcgagaagaatcccatcgactttctggaagccaagggctacaaagaagtgaaaaaggacctgatcatcaagctgcctaagtactccctgttcgagctggaaaacggccggaagagaatgctggcctctgccggcgaactgcagaagggaaacgaactggccctgccctccaaatatgtgaacttcctgtacctggccagccactatgagaagctgaagggctcccccgaggataatgagcagaaacagctgtttgtggaacagcacaagcactacctggacgagatcatcgagcagatcagcgagttctccaagagagtgatcctggccgacgctaatctggacaaagtgctgtccgcctacaacaagcaccgggataagcccatcagagagcaggccgagaatatcatccacctgtttaccctgaccaatctgggagcccctgccgccttcaagtactttgacaccaccatcgaccggaagaggtacaccagcaccaaagaggtgctggacgccaccctgatccaccagagcatcaccggcctgtacgagacacggatcgacctgtctcagctgggaggtgactccggcggcagcagcggaggcagcagcggctccgagacccccggcacctccgagagcgccacccccgagtccagcggcggcagctccggcggcagctccacactgaatatcgaggacgagtaccgcctgcacgagaccagcaaggagcccgacgtgtccctgggctccacctggctgagcgacttcccccaggcctgggccgagaccggcggcatgggcctggccgtgagacaggcccctctgatcatccccctgaaggccacctccacccccgtgagcatcaagcagtacccaatgtcccaggaggccaggctgggcatcaagccccacatccagcggctgctggatcagggcatcctggtgccctgtcagagcccctggaacacccccctgctgccagtgaagaagcccggcaccaacgactatcggcctgtgcaggacctgcgggaggtgaacaaacgggtggaggacatccaccccaccgtgcctaacccatacaacctgctgtccggcctgcccccaagccaccagtggtacaccgtgctggacctgaaggacgccttcttctgcctgcggctgcaccccaccagccagcccctgttcgccttcgagtggagggaccccgagatgggcatctccggccagctgacctggaccaggctgccccagggcttcaagaacagccccaccctgttcaacgaggccctgcaccgcgacctggccgattttagaatccagcaccctgacctgatcctgctgcagtacgtggacgacctgctgctggccgccaccagcgagctggactgccagcagggcaccagggccctgctgcagaccctgggcaacctgggctacagggccagcgccaagaaggcccagatctgccagaagcaggtgaagtacctgggctacctgctgaaggagggccagcggtggctgacagaggccagaaaggagaccgtgatgggccagcccacacccaagacccccaggcagctgcgggagttcctgggcaaggccggcttttgccggctgttcatccctggcttcgccgagatggccgccccactgtaccccctgaccaagcctgggaccctgttcaactggggccccgaccagcagaaggcctaccaggagatcaagcaggccctgctgaccgcccctgccctgggactgccagacctgaccaagcccttcgagctgttcgtggacgagaagcagggctacgccaagggcgtgctgacacagaagctgggcccatggaggagacccgtggcctacctgtccaagaagctggacccagtggccgccggctggccaccctgcctgaggatggtggccgccatcgccgtgctgaccaaggatgccggcaagctgaccatgggccagcccctggtgatcctggcccctcacgccgtggaggccctggtgaagcagccccccgacaggtggctgagcaacgccaggatgacccactaccaggccctgctgctggacaccgacagggtgcagttcggccctgtggtggccctgaaccccgccaccctgctgcccctgcccgaggagggcctgcagcacaattgcctggacatcctggccgaggcccacggaacccgccctgacctgaccgaccagcctctgcccgacgccgaccacacctggtataccgacggaagctccctgctgcaggagggccagaggaaggccggggccgccgtgacaaccgagaccgaggtgatctgggccaaggctctgcccgccggcaccagcgcccagcgggccgagctgatcgccctgacccaggccctgaagatggccgagggcaagaagctgaacgtgtacaccgactcccggtacgccttcgccaccgcccacatccacggcgaaatctacaggcggaggggctggctgaccagcgagggcaaggagatcaagaacaaggacgagatcctggccctgctgaaggccctgttcctgcccaagaggctgtctatcatccactgccccggccatcagaagggccacagcgccgaggccaggggcaaccggatggccgaccaggccgccaggaaagccgccatcaccgagacacccgatacctccaccctgctgatcgagaacagcagcccc

SEQ ID NO: 255 - DNA, 6351 bp, synthetic construct
  misc_feature 1..6351: note = Description of Artificial Sequence: Synthetic polynucleotide
  source 1..6351: mol_type = other DNA
atgaaacggacagccgacggaagcgagttcgagtcaccaaagaagaagcggaaagtcgacaagaagtacagcatcggcctggacatcggcaccaactctgtgggctgggccgtgatcaccgacgagtacaaggtgcccagcaagaaattcaaggtgctgggcaacaccgaccggcacagcatcaagaagaacctgatcggagccctgctgttcgacagcggcgaaacagccgaggccacccggctgaagagaaccgccagaagaagatacaccagacggaagaaccggatctgctatctgcaagagatcttcagcaacgagatggccaaggtggacgacagcttcttccacagactggaagagtccttcctggtggaagaggataagaagcacgagcggcaccccatcttcggcaacatcgtggacgaggtggcctaccacgagaagtaccccaccatctaccacctgagaaagaaactggtggacagcaccgacaaggccgacctgcggctgatctatctggccctggcccacatgatcaagttccggggccacttcctgatcgagggcgacctgaaccccgacaacagcgacgtggacaagctgttcatccagctggtgcagacctacaaccagctgttcgaggaaaaccccatcaacgccagcggcgtggacgccaaggccatcctgtctgccagactgagcaagagcagacggctggaaaatctgatcgcccagctgcccggcgagaagaagaatggcctgttcggaaacctgattgccctgagcctgggcctgacccccaacttcaagagcaacttcgacctggccgaggatgccaaactgcagctgagcaaggacacctacgacgacgacctggacaacctgctggcccagatcggcgaccagtacgccgacctgtttctggccgccaagaacctgtccgacgccatcctgctgagcgacatcctgagagtgaacaccgagatcaccaaggcccccctgagcgcctctatgatcaagagatacgacgagcaccaccaggacctgaccctgctgaaagctctcgtgcggcagcagctgcctgagaagtacaaagagattttcttcgaccagagcaagaacggctacgccggctacattgacggcggagccagccaggaagagttctacaagttcatcaagcccatcctggaaaagatggacggcaccgaggaactgctcgtgaagctgaacagagaggacctgctgcggaagcagcggaccttcgacaacggcagcatcccccaccagatccacctgggagagctgcacgccattctgcggcggcaggaagatttttacccattcctgaaggacaaccgggaaaagatcgagaagatcctgaccttccgcatcccctactacgtgggccctctggccaggggaaacagcagattcgcctggatgaccagaaagagcgaggaaaccatcaccccctggaacttcgaggaagtggtggacaagggcgcttccgcccagagcttcatcgagcggatgaccaacttcgataagaacctgcccaacgagaaggtgctgcccaagcacagcctgctgtacgagtacttcaccgtgtataacgagctgaccaaagtgaaatacgtgaccgagggaatgagaaagcccgccttcctgagcggcgagcagaaaaaggccatcgtggacctgctgttcaagaccaaccggaaagtgaccgtgaagcagctgaaagaggactacttcaagaaaatcgagtgcttcgactccgtggaaatctccggcgtggaagatcggttcaacgcctccctgggcacataccacgatctgctgaaaattatcaaggacaaggacttcctggacaatgaggaaaacgaggacattctggaagatatcgtgctgaccctgacactgtttgaggacagagagatgatcgaggaacggctgaaaacctatgcccacctgttcgacgacaaagtgatgaagcagctgaagcggcggagatacaccggctggggcaggctgagccggaagctgatcaacggcatccgggacaagcagtccggcaagacaatcctggatttcctgaagtccgacggcttcgccaacagaaacttcatgcagctgatccacgacgacagcctgacctttaaagaggacatccagaaagcccaggtgtccggccagggcgatagcctgcacgagcacattgccaatctggccggcagccccgccattaagaagggcatcctgcagacagtgaaggtggtggacgagctcgtgaaagtgatgggccggcacaagcccgagaacatcgtgatcgaaatggccagagagaaccagaccacccagaagggacagaagaacagccgcgagagaatgaagcggatcgaagagggcatcaaagagctgggcagccagatcctgaaagaacaccccgtggaaaacacccagctgcagaacgagaagctgtacctgtactacctgcagaatgggcgggatatgtacgtggaccaggaactggacatcaaccggctgtccgactacgatgtggacgctatcgtgcctcagagctttctgaaggacgactccatcgacaacaaggtgctgaccagaagcgacaagaaccggggcaagagcgacaacgtgccctccgaagaggtcgtgaagaagatgaagaactactggcggcagctgctgaacgccaagctgattacccagagaaagttcgacaatctgaccaaggccgagagaggcggcctgagcgaactggataaggccggcttcatcaagagacagctggtggaaacccggcagatcacaaagcacgtggcacagatcctggactcccggatgaacactaagtacgacgagaatgacaagctgatccgggaagtgaaagtgatcaccctgaagtccaagctggtgtccgatttccggaaggatttccagttttacaaagtgcgcgagatcaacaactaccaccacgcccacgacgcctacctgaacgccgtcgtgggaaccgccctgatcaaaaagtaccctaagctggaaagcgagttcgtgtacggcgactacaaggtgtacgacgtgcggaagatgatcgccaagagcgagcaggaaatcggcaaggctaccgccaagtacttcttctacagcaacatcatgaactttttcaagaccgagattaccctggccaacggcgagatccggaagcggcctctgatcgagacaaacggcgaaaccggggagatcgtgtgggataagggccgggattttgccaccgtgcggaaagtgctgagcatgccccaagtgaatatcgtgaaaaagaccgaggtgcagacaggcggcttcagcaaagagtctatcctgcccaagaggaacagcgataagctgatcgccagaaagaaggactgggaccctaagaagtacggcggcttcgacagccccaccgtggcctattctgtgctggtggtggccaaagtggaaaagggcaagtccaagaaactgaagagtgtgaaagagctgctggggatcaccatcatggaaagaagcagcttcgagaagaatcccatcgactttctggaagccaagggctacaaagaagtgaaaaaggacctgatcatcaagctgcctaagtactccctgttcgagctggaaaacggccggaagagaatgctggcctctgccggcgaactgcagaagggaaacgaactggccctgccctccaaatatgtgaacttcctgtacctggccagccactatgagaagctgaagggctcccccgaggataatgagcagaaacagctgtttgtggaacagcacaagcactacctggacgagatcatcgagcagatcagcgagttctccaagagagtgatcctggccgacgctaatctggacaaagtgctgtccgcctacaacaagcaccgggataagcccatcagagagcaggccgagaatatcatccacctgtttaccctgaccaatctgggagcccctgccgccttcaagtactttgacaccaccatcgaccggaagaggtacaccagcaccaaagaggtgctggacgccaccctgatccaccagagcatcaccggcctgtacgagacacggatcgacctgtctcagctgggaggtgacagcggcggcagcagcggcggcagcagcggcagcgagacccccggcaccagcgagtccgccacccccgagagcagcggcggctcaagcggcggcagcagcaccctgaacatcgaggacgagtacagactgcacgagaccagcaaggagcccgacgtgtccctgggctctacctggctgagcgacttcccccaggcctgggccgagaccggcggaatgggcctggccgtgagacaggccccactgatcatcccactgaaggccaccagcacccccgtgagcatcaagcagtaccctatgtcacaggaggccagactgggcatcaagccacacatccagagactgctggaccagggcatcctggtgccctgccagagcccatggaacacccccctgctgcccgtcaagaagcccggcaccaacgactacaggcccgtgcaggacctgcgggaggtgaacaagcgcgtggaggacatccaccctaccgtgcccaacccctacaacctgctgtccggcctgccacccagccatcagtggtacaccgtgctggacctgaaggacgccttcttctgcctgagactgcaccccacctcccagcctctgttcgccttcgagtggagagaccccgagatgggcatctccggccagctgacttggacaagactgccccagggcttcaagaattctccaaccctgttcaacgaggccctgcaccgggacctggccgacttcaggatccagcacccagacctgatcctgctgcagtacgtggacgacctgctgctggccgccaccagcgagctcgactgccagcagggcacccgggccctgctgcagactctgggcaacctgggctacagggccagcgccaagaaggcccagatctgccagaagcaggtgaagtacctgggctacctgctgaaggagggccagaggtggctgaccgaggccaggaaggagaccgtgatgggccagccaacccctaagacccccagacagctgagggagttcctgggcaaggccggcttctgccggctgttcatccccggcttcgccgagatggccgcccccctgtaccccctgaccaagcctggcaccctgttcaactggggccccgaccagcagaaggcctaccaggagatcaagcaggccctgctgaccgcccccgccctgggcctgcccgatctgaccaagccattcgagctgttcgtggacgagaaacagggctacgccaagggcgtgctgacccagaagctgggcccctggaggagacctgtggcctacctgagcaaaaagctggacccagtggccgccgggtggcccccctgcctgagaatggtggccgccatcgccgtgctgaccaaggacgccggcaagctgaccatgggacagcctctggtgatcctggccccccacgccgtggaggccctggtgaagcagccccccgataggtggctgagtaatgcccggatgacccactaccaggccctgctgctggacaccgacagggtgcagttcggccccgtggtggccctgaaccccgccaccctgctgccactgcccgaggagggcctgcagcataactgcctggacatcctggccgaggcccacggcaccaggcccgacctgaccgatcagcctctgcccgacgccgatcacacctggtacaccgatggcagcagcctgctgcaggagggccagagaaaggccggcgccgccgtgaccaccgagaccgaggtgatctgggccaaggccctgcccgccggcaccagcgcccagcgggccgaactgatcgccctgacccaggccctgaagatggccgagggcaagaagctgaacgtgtacaccgacagccggtacgccttcgccaccgctcacatccacggcgagatttacaggagaagaggctggctgaccagcgaaggcaaggagatcaagaacaaggacgagattctggccctgctgaaggccctgttcctgcctaagagactgtctatcatccactgccccggccaccagaaaggccacagcgccgaggccaggggcaacaggatggccgaccaggccgcccggaaggccgccatcaccgagacccccgacaccagcaccctgctgatcgagaactccagcccttccggcggctccaagaggactgccgacggctccgagttcgagcccaagaagaagaggaaagtc

SEQ ID NO: 256 - RNA, 6351 nt, synthetic construct
  misc_feature 1..6351: note = Description of Artificial Sequence: Synthetic polynucleotide
  source 1..6351: mol_type = other RNA
atgaaacggacagccgacggaagcgagttcgagtcaccaaagaagaagcggaaagtcgacaagaagtacagcatcggcctggacatcggcaccaactctgtgggctgggccgtgatcaccgacgagtacaaggtgcccagcaagaaattcaaggtgctgggcaacaccgaccggcacagcatcaagaagaacctgatcggagccctgctgttcgacagcggcgaaacagccgaggccacccggctgaagagaaccgccagaagaagatacaccagacggaagaaccggatctgctatctgcaagagatcttcagcaacgagatggccaaggtggacgacagcttcttccacagactggaagagtccttcctggtggaagaggataagaagcacgagcggcaccccatcttcggcaacatcgtggacgaggtggcctaccacgagaagtaccccaccatctaccacctgagaaagaaactggtggacagcaccgacaaggccgacctgcggctgatctatctggccctggcccacatgatcaagttccggggccacttcctgatcgagggcgacctgaaccccgacaacagcgacgtggacaagctgttcatccagctggtgcagacctacaaccagctgttcgaggaaaaccccatcaacgccagcggcgtggacgccaaggccatcctgtctgccagactgagcaagagcagacggctggaaaatctgatcgcccagctgcccggcgagaagaagaatggcctgttcggaaacctgattgccctgagcctgggcctgacccccaacttcaagagcaacttcgacctggccgaggatgccaaactgcagctgagcaaggacacctacgacgacgacctggacaacctgctggcccagatcggcgaccagtacgccgacctgtttctggccgccaagaacctgtccgacgccatcctgctgagcgacatcctgagagtgaacaccgagatcaccaaggcccccctgagcgcctctatgatcaagagatacgacgagcaccaccaggacctgaccctgctgaaagctctcgtgcggcagcagctgcctgagaagtacaaagagattttcttcgaccagagcaagaacggctacgccggctacattgacggcggagccagccaggaagagttctacaagttcatcaagcccatcctggaaaagatggacggcaccgaggaactgctcgtgaagctgaacagagaggacctgctgcggaagcagcggaccttcgacaacggcagcatcccccaccagatccacctgggagagctgcacgccattctgcggcggcaggaagatttttacccattcctgaaggacaaccgggaaaagatcgagaagatcctgaccttccgcatcccctactacgtgggccctctggccaggggaaacagcagattcgcctggatgaccagaaagagcgaggaaaccatcaccccctggaacttcgaggaagtggtggacaagggcgcttccgcccagagcttcatcgagcggatgaccaacttcgataagaacctgcccaacgagaaggtgctgcccaagcacagcctgctgtacgagtacttcaccgtgtataacgagctgaccaaagtgaaatacgtgaccgagggaatgagaaagcccgccttcctgagcggcgagcagaaaaaggccatcgtggacctgctgttcaagaccaaccggaaagtgaccgtgaagcagctgaaagaggactacttcaagaaaatcgagtgcttcgactccgtggaaatctccggcgtggaagatcggttcaacgcctccctgggcacataccacgatctgctgaaaattatcaaggacaaggacttcctggacaatgaggaaaacgaggacattctggaagatatcgtgctgaccctgacactgtttgaggacagagagatgatcgaggaacggctgaaaacctatgcccacctgttcgacgacaaagtgatgaagcagctgaagcggcggagatacaccggctggggcaggctgagccggaagctgatcaacggcatccgggacaagcagtccggcaagacaatcctggatttcctgaagtccgacggcttcgccaacagaaacttcatgcagctgatccacgacgacagcctgacctttaaagaggacatccagaaagcccaggtgtccggccagggcgatagcctgcacgagcacattgccaatctggccggcagccccgccattaagaagggcatcctgcagacagtgaaggtggtggacgagctcgtgaaagtgatgggccggcacaagcccgagaacatcgtgatcgaaatggccagagagaaccagaccacccagaagggacagaagaacagccgcgagagaatgaagcggatcgaagagggcatcaaagagctgggcagccagatcctgaaagaacaccccgtggaaaacacccagctgcagaacgagaagctgtacctgtactacctgcagaatgggcgggatatgtacgtggaccaggaactggacatcaaccggctgtccgactacgatgtggacgctatcgtgcctcagagctttctgaaggacgactccatcgacaacaaggtgctgaccagaagcgacaagaaccggggcaagagcgacaacgtgccctccgaagaggtcgtgaagaagatgaagaactactggcggcagctgctgaacgccaagctgattacccagagaaagttcgacaatctgaccaaggccgagagaggcggcctgagcgaactggataaggccggcttcatcaagagacagctggtggaaacccggcagatcacaaagcacgtggcacagatcctggactcccggatgaacactaagtacgacgagaatgacaagctgatccgggaagtgaaagtgatcaccctgaagtccaagctggtgtccgatttccggaaggatttccagttttacaaagtgcgcgagatcaacaactaccaccacgcccacgacgcctacctgaacgccgtcgtgggaaccgccctgatcaaaaagtaccctaagctggaaagcgagttcgtgtacggcgactacaaggtgtacgacgtgcggaagatgatcgccaagagcgagcaggaaatcggcaaggctaccgccaagtacttcttctacagcaacatcatgaactttttcaagaccgagattaccctggccaacggcgagatccggaagcggcctctgatcgagacaaacggcgaaaccggggagatcgtgtgggataagggccgggattttgccaccgtgcggaaagtgctgagcatgccccaagtgaatatcgtgaaaaagaccgaggtgcagacaggcggcttcagcaaagagtctatcctgcccaagaggaacagcgataagctgatcgccagaaagaaggactgggaccctaagaagtacggcggcttcgacagccccaccgtggcctattctgtgctggtggtggccaaagtggaaaagggcaagtccaagaaactgaagagtgtgaaagagctgctggggatcaccatcatggaaagaagcagcttcgagaagaatcccatcgactttctggaagccaagggctacaaagaagtgaaaaaggacctgatcatcaagctgcctaagtactccctgttcgagctggaaaacggccggaagagaatgctggcctctgccggcgaactgcagaagggaaacgaactggccctgccctccaaatatgtgaacttcctgtacctggccagccactatgagaagctgaagggctcccccgaggataatgagcagaaacagctgtttgtggaacagcacaagcactacctggacgagatcatcgagcagatcagcgagttctccaagagagtgatcctggccgacgctaatctggacaaagtgctgtccgcctacaacaagcaccgggataagcccatcagagagcaggccgagaatatcatccacctgtttaccctgaccaatctgggagcccctgccgccttcaagtactttgacaccaccatcgaccggaagaggtacaccagcaccaaagaggtgctggacgccaccctgatccaccagagcatcaccggcctgtacgagacacggatcgacctgtctcagctgggaggtgacagcggcggcagcagcggcggcagcagcggcagcgagacccccggcaccagcgagtccgccacccccgagagcagcggcggctcaagcggcggcagcagcaccctgaacatcgaggacgagtacagactgcacgagaccagcaaggagcccgacgtgtccctgggctctacctggctgagcgacttcccccaggcctgggccgagaccggcggaatgggcctggccgtgagacaggccccactgatcatcccactgaaggccaccagcacccccgtgagcatcaagcagtaccctatgtcacaggaggccagactgggcatcaagccacacatccagagactgctggaccagggcatcctggtgccctgccagagcccatggaacacccccctgctgcccgtcaagaagcccggcaccaacgactacaggcccgtgcaggacctgcgggaggtgaacaagcgcgtggaggacatccaccctaccgtgcccaacccctacaacctgctgtccggcctgccacccagccatcagtggtacaccgtgctggacctgaaggacgccttcttctgcctgagactgcaccccacctcccagcctctgttcgccttcgagtggagagaccccgagatgggcatctccggccagctgacttggacaagactgccccagggcttcaagaattctccaaccctgttcaacgaggccctgcaccgggacctggccgacttcaggatccagcacccagacctgatcctgctgcagtacgtggacgacctgctgctggccgccaccagcgagctcgactgccagcagggcacccgggccctgctgcagactctgggcaacctgggctacagggccagcgccaagaaggcccagatctgccagaagcaggtgaagtacctgggctacctgctgaaggagggccagaggtggctgaccgaggccaggaaggagaccgtgatgggccagccaacccctaagacccccagacagctgagggagttcctgggcaaggccggcttctgccggctgttcatccccggcttcgccgagatggccgcccccctgtaccccctgaccaagcctggcaccctgttcaactggggccccgaccagcagaaggcctaccaggagatcaagcaggccctgctgaccgcccccgccctgggcctgcccgatctgaccaagccattcgagctgttcgtggacgagaaacagggctacgccaagggcgtgctgacccagaagctgggcccctggaggagacctgtggcctacctgagcaaaaagctggacccagtggccgccgggtggcccccctgcctgagaatggtggccgccatcgccgtgctgaccaaggacgccggcaagctgaccatgggacagcctctggtgatcctggccccccacgccgtggaggccctggtgaagcagccccccgataggtggctgagtaatgcccggatgacccactaccaggccctgctgctggacaccgacagggtgcagttcggccccgtggtggccctgaaccccgccaccctgctgccactgcccgaggagggcctgcagcataactgcctggacatcctggccgaggcccacggcaccaggcccgacctgaccgatcagcctctgcccgacgccgatcacacctggtacaccgatggcagcagcctgctgcaggagggccagagaaaggccggcgccgccgtgaccaccgagaccgaggtgatctgggccaaggccctgcccgccggcaccagcgcccagcgggccgaactgatcgccctgacccaggccctgaagatggccgagggcaagaagctgaacgtgtacaccgacagccggtacgccttcgccaccgctcacatccacggcgagatttacaggagaagaggctggctgaccagcgaaggcaaggagatcaagaacaaggacgagattctggccctgctgaaggccctgttcctgcctaagagactgtctatcatccactgccccggccaccagaaaggccacagcgccgaggccaggggcaacaggatggccgaccaggccgcccggaaggccgccatcaccgagacccccgacaccagcaccctgctgatcgagaactccagcccttccggcggctccaagaggactgccgacggctccgagttcgagcccaagaagaagaggaaagtc

SEQ ID NO: 257 - DNA, 2031 bp, synthetic construct
  misc_feature 1..2031: note = Description of Artificial Sequence: Synthetic polynucleotide
  source 1..2031: mol_type = other DNA
accctgaacatcgaggacgagtacagactgcacgagaccagcaaggagcccgacgtgtccctgggctctacctggctgagcgacttcccccaggcctgggccgagaccggcggaatgggcctggccgtgagacaggccccactgatcatcccactgaaggccaccagcacccccgtgagcatcaagcagtaccctatgtcacaggaggccagactgggcatcaagccacacatccagagactgctggaccagggcatcctggtgccctgccagagcccatggaacacccccctgctgcccgtcaagaagcccggcaccaacgactacaggcccgtgcaggacctgcgggaggtgaacaagcgcgtggaggacatccaccctaccgtgcccaacccctacaacctgctgtccggcctgccacccagccatcagtggtacaccgtgctggacctgaaggacgccttcttctgcctgagactgcaccccacctcccagcctctgttcgccttcgagtggagagaccccgagatgggcatctccggccagctgacttggacaagactgccccagggcttcaagaattctccaaccctgttcaacgaggccctgcaccgggacctggccgacttcaggatccagcacccagacctgatcctgctgcagtacgtggacgacctgctgctggccgccaccagcgagctcgactgccagcagggcacccgggccctgctgcagactctgggcaacctgggctacagggccagcgccaagaaggcccagatctgccagaagcaggtgaagtacctgggctacctgctgaaggagggccagaggtggctgaccgaggccaggaaggagaccgtgatgggccagccaacccctaagacccccagacagctgagggagttcctgggcaaggccggcttctgccggctgttcatccccggcttcgccgagatggccgcccccctgtaccccctgaccaagcctggcaccctgttcaactggggccccgaccagcagaaggcctaccaggagatcaagcaggccctgctgaccgcccccgccctgggcctgcccgatctgaccaagccattcgagctgttcgtggacgagaaacagggctacgccaagggcgtgctgacccagaagctgggcccctggaggagacctgtggcctacctgagcaaaaagctggacccagtggccgccgggtggcccccctgcctgagaatggtggccgccatcgccgtgctgaccaaggacgccggcaagctgaccatgggacagcctctggtgatcctggccccccacgccgtggaggccctggtgaagcagccccccgataggtggctgagtaatgcccggatgacccactaccaggccctgctgctggacaccgacagggtgcagttcggccccgtggtggccctgaaccccgccaccctgctgccactgcccgaggagggcctgcagcataactgcctggacatcctggccgaggcccacggcaccaggcccgacctgaccgatcagcctctgcccgacgccgatcacacctggtacaccgatggcagcagcctgctgcaggagggccagagaaaggccggcgccgccgtgaccaccgagaccgaggtgatctgggccaaggccctgcccgccggcaccagcgcccagcgggccgaactgatcgccctgacccaggccctgaagatggccgagggcaagaagctgaacgtgtacaccgacagccggtacgccttcgccaccgctcacatccacggcgagatttacaggagaagaggctggctgaccagcgaaggcaaggagatcaagaacaaggacgagattctggccctgctgaaggccctgttcctgcctaagagactgtctatcatccactgccccggccaccagaaaggccacagcgccgaggccaggggcaacaggatggccgaccaggccgcccggaaggccgccatcaccgagacccccgacaccagcaccctgctgatcgagaactccagccct

SEQ ID NO: 258 - RNA, 2031 nt, synthetic construct
  misc_feature 1..2031: note = Description of Artificial Sequence: Synthetic polynucleotide
  source 1..2031: mol_type = other RNA
accctgaacatcgaggacgagtacagactgcacgagaccagcaaggagcccgacgtgtccctgggctctacctggctgagcgacttcccccaggcctgggccgagaccggcggaatgggcctggccgtgagacaggccccactgatcatcccactgaaggccaccagcacccccgtgagcatcaagcagtaccctatgtcacaggaggccagactgggcatcaagccacacatccagagactgctggaccagggcatcctggtgccctgccagagcccatggaacacccccctgctgcccgtcaagaagcccggcaccaacgactacaggcccgtgcaggacctgcgggaggtgaacaagcgcgtggaggacatccaccctaccgtgcccaacccctacaacctgctgtccggcctgccacccagccatcagtggtacaccgtgctggacctgaaggacgccttcttctgcctgagactgcaccccacctcccagcctctgttcgccttcgagtggagagaccccgagatgggcatctccggccagctgacttggacaagactgccccagggcttcaagaattctccaaccctgttcaacgaggccctgcaccgggacctggccgacttcaggatccagcacccagacctgatcctgctgcagtacgtggacgacctgctgctggccgccaccagcgagctcgactgccagcagggcacccgggccctgctgcagactctgggcaacctgggctacagggccagcgccaagaaggcccagatctgccagaagcaggtgaagtacctgggctacctgctgaaggagggccagaggtggctgaccgaggccaggaaggagaccgtgatgggccagccaacccctaagacccccagacagctgagggagttcctgggcaaggccggcttctgccggctgttcatccccggcttcgccgagatggccgcccccctgtaccccctgaccaagcctggcaccctgttcaactggggccccgaccagcagaaggcctaccaggagatcaagcaggccctgctgaccgcccccgccctgggcctgcccgatctgaccaagccattcgagctgttcgtggacgagaaacagggctacgccaagggcgtgctgacccagaagctgggcccctggaggagacctgtggcctacctgagcaaaaagctggacccagtggccgccgggtggcccccctgcctgagaatggtggccgccatcgccgtgctgaccaaggacgccggcaagctgaccatgggacagcctctggtgatcctggccccccacgccgtggaggccctggtgaagcagccccccgataggtggctgagtaatgcccggatgacccactaccaggccctgctgctggacaccgacagggtgcagttcggccccgtggtggccctgaaccccgccaccctgctgccactgcccgaggagggcctgcagcataactgcctggacatcctggccgaggcccacggcaccaggcccgacctgaccgatcagcctctgcccgacgccgatcacacctggtacaccgatggcagcagcctgctgcaggagggccagagaaaggccggcgccgccgtgaccaccgagaccgaggtgatctgggccaaggccctgcccgccggcaccagcgcccagcgggccgaactgatcgccctgacccaggccctgaagatggccgagggcaagaagctgaacgtgtacaccgacagccggtacgccttcgccaccgctcacatccacggcgagatttacaggagaagaggctggctgaccagcgaaggcaaggagatcaagaacaaggacgagattctggccctgctgaaggccctgttcctgcctaagagactgtctatcatccactgccccggccaccagaaaggccacagcgccgaggccaggggcaacaggatggccgaccaggccgcccggaaggccgccatcaccgagacccccgacaccagcaccctgctgatcgagaactccagccct

SEQ ID NO: 259 - DNA, 99 bp, synthetic construct
  misc_feature 1..99: note = Description of Artificial Sequence: Synthetic polynucleotide
  source 1..99: mol_type = other DNA
agcggcggcagcagcggcggcagcagcggcagcgagacccccggcaccagcgagtccgccacccccgagagcagcggcggctcaagcggcggcagcagc

SEQ ID NO: 260 - RNA, 99 nt, synthetic construct
  misc_feature 1..99: note = Description of Artificial Sequence: Synthetic polynucleotide
  source 1..99: mol_type = other RNA
agcggcggcagcagcggcggcagcagcggcagcgagacccccggcaccagcgagtccgccacccccgagagcagcggcggctcaagcggcggcagcagc

SEQ ID NO: 261 - DNA, 2193 bp, synthetic construct
  misc_feature 1..2193: note = Description of Artificial Sequence: Synthetic polynucleotide
  source 1..2193: mol_type = other DNA
agcggcggcagcagcggcggcagcagcggcagcgagacccccggcaccagcgagtccgccacccccgagagcagcggcggctcaagcggcggcagcagcaccctgaacatcgaggacgagtacagactgcacgagaccagcaaggagcccgacgtgtccctgggctctacctggctgagcgacttcccccaggcctgggccgagaccggcggaatgggcctggccgtgagacaggccccactgatcatcccactgaaggccaccagcacccccgtgagcatcaagcagtaccctatgtcacaggaggccagactgggcatcaagccacacatccagagactgctggaccagggcatcctggtgccctgccagagcccatggaacacccccctgctgcccgtcaagaagcccggcaccaacgactacaggcccgtgcaggacctgcgggaggtgaacaagcgcgtggaggacatccaccctaccgtgcccaacccctacaacctgctgtccggcctgccacccagccatcagtggtacaccgtgctggacctgaaggacgccttcttctgcctgagactgcaccccacctcccagcctctgttcgccttcgagtggagagaccccgagatgggcatctccggccagctgacttggacaagactgccccagggcttcaagaattctccaaccctgttcaacgaggccctgcaccgggacctggccgacttcaggatccagcacccagacctgatcctgctgcagtacgtggacgacctgctgctggccgccaccagcgagctcgactgccagcagggcacccgggccctgctgcagactctgggcaacctgggctacagggccagcgccaagaaggcccagatctgccagaagcaggtgaagtacctgggctacctgctgaaggagggccagaggtggctgaccgaggccaggaaggagaccgtgatgggccagccaacccctaagacccccagacagctgagggagttcctgggcaaggccggcttctgccggctgttcatccccggcttcgccgagatggccgcccccctgtaccccctgaccaagcctggcaccctgttcaactggggccccgaccagcagaaggcctaccaggagatcaagcaggccctgctgaccgcccccgccctgggcctgcccgatctgaccaagccattcgagctgttcgtggacgagaaacagggctacgccaagggcgtgctgacccagaagctgggcccctggaggagacctgtggcctacctgagcaaaaagctggacccagtggccgccgggtggcccccctgcctgagaatggtggccgccatcgccgtgctgaccaaggacgccggcaagctgaccatgggacagcctctggtgatcctggccccccacgccgtggaggccctggtgaagcagccccccgataggtggctgagtaatgcccggatgacccactaccaggccctgctgctggacaccgacagggtgcagttcggccccgtggtggccctgaaccccgccaccctgctgccactgcccgaggagggcctgcagcataactgcctggacatcctggccgaggcccacggcaccaggcccgacctgaccgatcagcctctgcccgacgccgatcacacctggtacaccgatggcagcagcctgctgcaggagggccagagaaaggccggcgccgccgtgaccaccgagaccgaggtgatctgggccaaggccctgcccgccggcaccagcgcccagcgggccgaactgatcgccctgacccaggccctgaagatggccgagggcaagaagctgaacgtgtacaccgacagccggtacgccttcgccaccgctcacatccacggcgagatttacaggagaagaggctggctgaccagcgaaggcaaggagatcaagaacaaggacgagattctggccctgctgaaggccctgttcctgcctaagagactgtctatcatccactgccccggccaccagaaaggccacagcgccgaggccaggggcaacaggatggccgaccaggccgcccggaaggccgccatcaccgagacccccgacaccagcaccctgctgatcgagaactccagcccttccggcggctccaagaggactgccgacggctccgagttcgagcccaagaagaagaggaaagtc

SEQ ID NO: 262 - RNA, 2193 nt, synthetic construct
  misc_feature 1..2193: note = Description of Artificial Sequence: Synthetic polynucleotide
  source 1..2193: mol_type = other RNA
agcggcggcagcagcggcggcagcagcggcagcgagacccccggcaccagcgagtccgccacccccgagagcagcggcggctcaagcggcggcagcagcaccctgaacatcgaggacgagtacagactgcacgagaccagcaaggagcccgacgtgtccctgggctctacctggctgagcgacttcccccaggcctgggccgagaccggcggaatgggcctggccgtgagacaggccccactgatcatcccactgaaggccaccagcacccccgtgagcatcaagcagtaccctatgtcacaggaggccagactgggcatcaagccacacatccagagactgctggaccagggcatcctggtgccctgccagagcccatggaacacccccctgctgcccgtcaagaagcccggcaccaacgactacaggcccgtgcaggacctgcgggaggtgaacaagcgcgtggaggacatccaccctaccgtgcccaacccctacaacctgctgtccggcctgccacccagccatcagtggtacaccgtgctggacctgaaggacgccttcttctgcctgagactgcaccccacctcccagcctctgttcgccttcgagtggagagaccccgagatgggcatctccggccagctgacttggacaagactgccccagggcttcaagaattctccaaccctgttcaacgaggccctgcaccgggacctggccgacttcaggatccagcacccagacctgatcctgctgcagtacgtggacgacctgctgctggccgccaccagcgagctcgactgccagcagggcacccgggccctgctgcagactctgggcaacctgggctacagggccagcgccaagaaggcccagatctgccagaagcaggtgaagtacctgggctacctgctgaaggagggccagaggtggctgaccgaggccaggaaggagaccgtgatgggccagccaacccctaagacccccagacagctgagggagttcctgggcaaggccggcttctgccggctgttcatccccggcttcgccgagatggccgcccccctgtaccccctgaccaagcctggcaccctgttcaactggggccccgaccagcagaaggcctaccaggagatcaagcaggccctgctgaccgcccccgccctgggcctgcccgatctgaccaagccattcgagctgttcgtggacgagaaacagggctacgccaagggcgtgctgacccagaagctgggcccctggaggagacctgtggcctacctgagcaaaaagctggacccagtggccgccgggtggcccccctgcctgagaatggtggccgccatcgccgtgctgaccaaggacgccggcaagctgaccatgggacagcctctggtgatcctggccccccacgccgtggaggccctggtgaagcagccccccgataggtggctgagtaatgcccggatgacccactaccaggccctgctgctggacaccgacagggtgcagttcggccccgtggtggccctgaaccccgccaccctgctgccactgcccgaggagggcctgcagcataactgcctggacatcctggccgaggcccacggcaccaggcccgacctgaccgatcagcctctgcccgacgccgatcacacctggtacaccgatggcagcagcctgctgcaggagggccagagaaaggccggcgccgccgtgaccaccgagaccgaggtgatctgggccaaggccctgcccgccggcaccagcgcccagcgggccgaactgatcgccctgacccaggccctgaagatggccgagggcaagaagctgaacgtgtacaccgacagccggtacgccttcgccaccgctcacatccacggcgagatttacaggagaagaggctggctgaccagcgaaggcaaggagatcaagaacaaggacgagattctggccctgctgaaggccctgttcctgcctaagagactgtctatcatccactgccccggccaccagaaaggccacagcgccgaggccaggggcaacaggatggccgaccaggccgcccggaaggccgccatcaccgagacccccgacaccagcaccctgctgatcgagaactccagcccttccggcggctccaagaggactgccgacggctccgagttcgagcccaagaagaagaggaaagtc

SEQ ID NO: 263 - DNA, 63 bp, synthetic construct
  misc_feature 1..63: note = Description of Artificial Sequence: Synthetic polynucleotide
  source 1..63: mol_type = other DNA
tccggcggctccaagaggactgccgacggctccgagttcgagcccaagaagaagaggaaagtc

SEQ ID NO: 264 - RNA, 63 nt, synthetic construct
  misc_feature 1..63: note = Description of Artificial Sequence: Synthetic polynucleotide
  source 1..63: mol_type = other RNA
tccggcggctccaagaggactgccgacggctccgagttcgagcccaagaagaagaggaaagtc

SEQ ID NO: 265 - DNA, 6231 bp, synthetic construct
  misc_feature 1..6231: note = Description of Artificial Sequence: Synthetic polynucleotide
  source 1..6231: mol_type = other DNA
gacaagaagtacagcatcggcctggacatcggcaccaactctgtgggctgggccgtgatcaccgacgagtacaaggtgcccagcaagaaattcaaggtgctgggcaacaccgaccggcacagcatcaagaagaacctgatcggagccctgctgttcgacagcggcgaaacagccgaggccacccggctgaagagaaccgccagaagaagatacaccagacggaagaaccggatctgctatctgcaagagatcttcagcaacgagatggccaaggtggacgacagcttcttccacagactggaagagtccttcctggtggaagaggataagaagcacgagcggcaccccatcttcggcaacatcgtggacgaggtggcctaccacgagaagtaccccaccatctaccacctgagaaagaaactggtggacagcaccgacaaggccgacctgcggctgatctatctggccctggcccacatgatcaagttccggggccacttcctgatcgagggcgacctgaaccccgacaacagcgacgtggacaagctgttcatccagctggtgcagacctacaaccagctgttcgaggaaaaccccatcaacgccagcggcgtggacgccaaggccatcctgtctgccagactgagcaagagcagacggctggaaaatctgatcgcccagctgcccggcgagaagaagaatggcctgttcggaaacctgattgccctgagcctgggcctgacccccaacttcaagagcaacttcgacctggccgaggatgccaaactgcagctgagcaaggacacctacgacgacgacctggacaacctgctggcccagatcggcgaccagtacgccgacctgtttctggccgccaagaacctgtccgacgccatcctgctgagcgacatcctgagagtgaacaccgagatcaccaaggcccccctgagcgcctctatgatcaagagatacgacgagcaccaccaggacctgaccctgctgaaagctctcgtgcggcagcagctgcctgagaagtacaaagagattttcttcgaccagagcaagaacggctacgccggctacattgacggcggagccagccaggaagagttctacaagttcatcaagcccatcctggaaaagatggacggcaccgaggaactgctcgtgaagctgaacagagaggacctgctgcggaagcagcggaccttcgacaacggcagcatcccccaccagatccacctgggagagctgcacgccattctgcggcggcaggaagatttttacccattcctgaaggacaaccgggaaaagatcgagaagatcctgaccttccgcatcccctactacgtgggccctctggccaggggaaacagcagattcgcctggatgaccagaaagagcgaggaaaccatcaccccctggaacttcgaggaagtggtggacaagggcgcttccgcccagagcttcatcgagcggatgaccaacttcgataagaacctgcccaacgagaaggtgctgcccaagcacagcctgctgtacgagtacttcaccgtgtataacgagctgaccaaagtgaaatacgtgaccgagggaatgagaaagcccgccttcctgagcggcgagcagaaaaaggccatcgtggacctgctgttcaagaccaaccggaaagtgaccgtgaagcagctgaaagaggactacttcaagaaaatcgagtgcttcgactccgtggaaatctccggcgtggaagatcggttcaacgcctccctgggcacataccacgatctgctgaaaattatcaaggacaaggacttcctggacaatgaggaaaacgaggacattctggaagatatcgtgctgaccctgacactgtttgaggacagagagatgatcgaggaacggctgaaaacctatgcccacctgttcgacgacaaagtgatgaagcagctgaagcggcggagatacaccggctggggcaggctgagccggaagctgatcaacggcatccgggacaagcagtccggcaagacaatcctggatttcctgaagtccgacggcttcgccaacagaaacttcatgcagctgatccacgacgacagcctgacctttaaagaggacatccagaaagcccaggtgtccggccagggcgatagcctgcacgagcacattgccaatctggccggcagccccgccattaagaagggcatcctgcagacagtgaaggtggtggacgagctcgtgaaagtgatgggccggcacaagcccgagaacatcgtgatcgaaatggccagagagaaccagaccacccagaagggacagaagaacagccgcgagagaatgaagcggatcgaagagggcatcaaagagctgggcagccagatcctgaaagaacaccccgtggaaaacacccagctgcagaacgagaagctgtacctgtactacctgcagaatgggcgggatatgtacgtggaccaggaactggacatcaaccggctgtccgactacgatgtggacgctatcgtgcctcagagctttctgaaggacgactccatcgacaacaaggtgctgaccagaagcgacaagaaccggggcaagagcgacaacgtgccctccgaagaggtcgtgaagaagatgaagaactactggcggcagctgctgaacgccaagctgattacccagagaaagttcgacaatctgaccaaggccgagagaggcggcctgagcgaactggataaggccggcttcatcaagagacagctggtggaaacccggcagatcacaaagcacgtggcacagatcctggactcccggatgaacactaagtacgacgagaatgacaagctgatccgggaagtgaaagtgatcaccctgaagtccaagctggtgtccgatttccggaaggatttccagttttacaaagtgcgcgagatcaacaactaccaccacgcccacgacgcctacctgaacgccgtcgtgggaaccgccctgatcaaaaagtaccctaagctggaaagcgagttcgtgtacggcgactacaaggtgtacgacgtgcggaagatgatcgccaagagcgagcaggaaatcggcaaggctaccgccaagtacttcttctacagcaacatcatgaactttttcaagaccgagattaccctggccaacggcgagatccggaagcggcctctgatcgagacaaacggcgaaaccggggagatcgtgtgggataagggccgggattttgccaccgtgcggaaagtgctgagcatgccccaagtgaatatcgtgaaaaagaccgaggtgcagacaggcggcttcagcaaagagtctatcctgcccaagaggaacagcgataagctgatcgccagaaagaaggactgggaccctaagaagtacggcggcttcgacagccccaccgtggcctattctgtgctggtggtggccaaagtggaaaagggcaagtccaagaaactgaagagtgtgaaagagctgctggggatcaccatcatggaaagaagcagcttcgagaagaatcccatcgactttctggaagccaagggctacaaagaagtgaaaaaggacctgatcatcaagctgcctaagtactccctgttcgagctggaaaacggccggaagagaatgctggcctctgccggcgaactgcagaagggaaacgaactggccctgccctccaaatatgtgaacttcctgtacctggccagccactatgagaagctgaagggctcccccgaggataatgagcagaaacagctgtttgtggaacagcacaagcactacctggacgagatcatcgagcagatcagcgagttctccaagagagtgatcctggccgacgctaatctggacaaagtgctgtccgcctacaacaagcaccgggataagcccatcagagagcaggccgagaatatcatccacctgtttaccctgaccaatctgggagcccctgccgccttcaagtactttgacaccaccatcgaccggaagaggtacaccagcaccaaagaggtgctggacgccaccctgatccaccagagcatcaccggcctgtacgagacacggatcgacctgtctcagctgggaggtgacagcggcggcagcagcggcggcagcagcggcagcgagacccccggcaccagcgagtccgccacccccgagagcagcggcggctcaagcggcggcagcagcaccctgaacatcgaggacgagtacagactgcacgagaccagcaaggagcccgacgtgtccctgggctctacctggctgagcgacttcccccaggcctgggccgagaccggcggaatgggcctggccgtgagacaggccccactgatcatcccactgaaggccaccagcacccccgtgagcatcaagcagtaccctatgtcacaggaggccagactgggcatcaagccacacatccagagactgctggaccagggcatcctggtgccctgccagagcccatggaacacccccctgctgcccgtcaagaagcccggcaccaacgactacaggcccgtgcaggacctgcgggaggtgaacaagcgcgtggaggacatccaccctaccgtgcccaacccctacaacctgctgtccggcctgccacccagccatcagtggtacaccgtgctggacctgaaggacgccttcttctgcctgagactgcaccccacctcccagcctctgttcgccttcgagtggagagaccccgagatgggcatctccggccagctgacttggacaagactgccccagggcttcaagaattctccaaccctgttcaacgaggccctgcaccgggacctggccgacttcaggatccagcacccagacctgatcctgctgcagtacgtggacgacctgctgctggccgccaccagcgagctcgactgccagcagggcacccgggccctgctgcagactctgggcaacctgggctacagggccagcgccaagaaggcccagatctgccagaagcaggtgaagtacctgggctacctgctgaaggagggccagaggtggctgaccgaggccaggaaggagaccgtgatgggccagccaacccctaagacccccagacagctgagggagttcctgggcaaggccggcttctgccggctgttcatccccggcttcgccgagatggccgcccccctgtaccccctgaccaagcctggcaccctgttcaactggggccccgaccagcagaaggcctaccaggagatcaagcaggccctgctgaccgcccccgccctgggcctgcccgatctgaccaagccattcgagctgttcgtggacgagaaacagggctacgccaagggcgtgctgacccagaagctgggcccctggaggagacctgtggcctacctgagcaaaaagctggacccagtggccgccgggtggcccccctgcctgagaatggtggccgccatcgccgtgctgaccaaggacgccggcaagctgaccatgggacagcctctggtgatcctggccccccacgccgtggaggccctggtgaagcagccccccgataggtggctgagtaatgcccggatgacccactaccaggccctgctgctggacaccgacagggtgcagttcggccccgtggtggccctgaaccccgccaccctgctgccactgcccgaggagggcctgcagcataactgcctggacatcctggccgaggcccacggcaccaggcccgacctgaccgatcagcctctgcccgacgccgatcacacctggtacaccgatggcagcagcctgctgcaggagggccagagaaaggccggcgccgccgtgaccaccgagaccgaggtgatctgggccaaggccctgcccgccggcaccagcgcccagcgggccgaactgatcgccctgacccaggccctgaagatggccgagggcaagaagctgaacgtgtacaccgacagccggtacgccttcgccaccgctcacatccacggcgagatttacaggagaagaggctggctgaccagcgaaggcaaggagatcaagaacaaggacgagattctggccctgctgaaggccctgttcctgcctaagagactgtctatcatccactgccccggccaccagaaaggccacagcgccgaggccaggggcaacaggatggccgaccaggccgcccggaaggccgccatcaccgagacccccgacaccagcaccctgctgatcgagaactccagccct

SEQ ID NO: 266 - RNA, 6231 nt, synthetic construct
  misc_feature 1..6231: note = Description of Artificial Sequence: Synthetic polynucleotide
  source 1..6231: mol_type = other RNA
gacaagaagtacagcatcggcctggacatcggcaccaactctgtgggctgggccgtgatcaccgacgagtacaaggtgcccagcaagaaattcaaggtgctgggcaacaccgaccggcacagcatcaagaagaacctgatcggagccctgctgttcgacagcggcgaaacagccgaggccacccggctgaagagaaccgccagaagaagatacaccagacggaagaaccggatctgctatctgcaagagatcttcagcaacgagatggccaaggtggacgacagcttcttccacagactggaagagtccttcctggtggaagaggataagaagcacgagcggcaccccatcttcggcaacatcgtggacgaggtggcctaccacgagaagtaccccaccatctaccacctgagaaagaaactggtggacagcaccgacaaggccgacctgcggctgatctatctggccctggcccacatgatcaagttccggggccacttcctgatcgagggcgacctgaaccccgacaacagcgacgtggacaagctgttcatccagctggtgcagacctacaaccagctgttcgaggaaaaccccatcaacgccagcggcgtggacgccaaggccatcctgtctgccagactgagcaagagcagacggctggaaaatctgatcgcccagctgcccggcgagaagaagaatggcctgttcggaaacctgattgccctgagcctgggcctgacccccaacttcaagagcaacttcgacctggccgaggatgccaaactgcagctgagcaaggacacctacgacgacgacctggacaacctgctggcccagatcggcgaccagtacgccgacctgtttctggccgccaagaacctgtccgacgccatcctgctgagcgacatcctgagagtgaacaccgagatcaccaaggcccccctgagcgcctctatgatcaagagatacgacgagcaccaccaggacctgaccctgctgaaagctctcgtgcggcagcagctgcctgagaagtacaaagagattttcttcgaccagagcaagaacggctacgccggctacattgacggcggagccagccaggaagagttctacaagttcatcaagcccatcctggaaaagatggacggcaccgaggaactgctcgtgaagctgaacagagaggacctgctgcggaagcagcggaccttcgacaacggcagcatcccccaccagatccacctgggagagctgcacgccattctgcggcggcaggaagatttttacccattcctgaaggacaaccgggaaaagatcgagaagatcctgaccttccgcatcccctactacgtgggccctctggccaggggaaacagcagattcgcctggatgaccagaaagagcgaggaaaccatcaccccctggaacttcgaggaagtggtggacaagggcgcttccgcccagagcttcatcgagcggatgaccaacttcgataagaacctgcccaacgagaaggtgctgcccaagcacagcctgctgtacgagtacttcaccgtgtataacgagctgaccaaagtgaaatacgtgaccgagggaatgagaaagcccgccttcctgagcggcgagcagaaaaaggccatcgtggacctgctgttcaagaccaaccggaaagtgaccgtgaagcagctgaaagaggactacttcaagaaaatcgagtgcttcgactccgtggaaatctccggcgtggaagatcggttcaacgcctccctgggcacataccacgatctgctgaaaattatcaaggacaaggacttcctggacaatgaggaaaacgaggacattctggaagatatcgtgctgaccctgacactgtttgaggacagagagatgatcgaggaacggctgaaaacctatgcccacctgttcgacgacaaagtgatgaagcagctgaagcggcggagatacaccggctggggcaggctgagccggaagctgatcaacggcatccgggacaagcagtccggcaagacaatcctggatttcctgaagtccgacggcttcgccaacagaaacttcatgcagctgatccacgacgacagcctgacctttaaagaggacatccagaaagcccaggtgtccggccagggcgatagcctgcacgagcacattgccaatctggccggcagccccgccattaagaagggcatcctgcagacagtgaaggtggtggacgagctcgtgaaagtgatgggccggcacaagcccgagaacatcgtgatcgaaatggccagagagaaccagaccacccagaagggacagaagaacagccgcgagagaatgaagcggatcgaagagggcatcaaagagctgggcagccagatcctgaaagaacaccccgtggaaaacacccagctgcagaacgagaagctgtacctgtactacctgcagaatgggcgggatatgtacgtggaccaggaactggacatcaaccggctgtccgactacgatgtggacgctatcgtgcctcagagctttctgaaggacgactccatcgacaacaaggtgctgaccagaagcgacaagaaccggggcaagagcgacaacgtgccctccgaagaggtcgtgaagaagatgaagaactactggcggcagctgctgaacgccaagctgattacccagagaaagttcgacaatctgaccaaggccgagagaggcggcctgagcgaactggataaggccggcttcatcaagagacagctggtggaaacccggcagatcacaaagcacgtggcacagatcctggactcccggatgaacactaagtacgacgagaatgacaagctgatccgggaagtgaaagtgatcaccctgaagtccaagctggtgtccgatttccggaaggatttccagttttacaaagtgcgcgagatcaacaactaccaccacgcccacgacgcctacctgaacgccgtcgtgggaaccgccctgatcaaaaagtaccctaagctggaaagcgagttcgtgtacggcgactacaaggtgtacgacgtgcggaagatgatcgccaagagcgagcaggaaatcggcaaggctaccgccaagtacttcttctacagcaacatcatgaactttttcaagaccgagattaccctggccaacggcgagatccggaagcggcctctgatcgagacaaacggcgaaaccggggagatcgtgtgggataagggccgggattttgccaccgtgcggaaagtgctgagcatgccccaagtgaatatcgtgaaaaagaccgaggtgcagacaggcggcttcagcaaagagtctatcctgcccaagaggaacagcgataagctgatcgccagaaagaaggactgggaccctaagaagtacggcggcttcgacagccccaccgtggcctattctgtgctggtggtggccaaagtggaaaagggcaagtccaagaaactgaagagtgtgaaagagctgctggggatcaccatcatggaaagaagcagcttcgagaagaatcccatcgactttctggaagccaagggctacaaagaagtgaaaaaggacctgatcatcaagctgcctaagtactccctgttcgagctggaaaacggccggaagagaatgctggcctctgccggcgaactgcagaagggaaacgaactggccctgccctccaaatatgtgaacttcctgtacctggccagccactatgagaagctgaagggctcccccgaggataatgagcagaaacagctgtttgtggaacagcacaagcactacctggacgagatcatcgagcagatcagcgagttctccaagagagtgatcctggccgacgctaatctggacaaagtgctgtccgcctacaacaagcaccgggataagcccatcagagagcaggccgagaatatcatccacctgtttaccctgaccaatctgggagcccctgccgccttcaagtactttgacaccaccatcgaccggaagaggtacaccagcaccaaagaggtgctggacgccaccctgatccaccagagcatcaccggcctgtacgagacacggatcgacctgtctcagctgggaggtgacagcggcggcagcagcggcggcagcagcggcagcgagacccccggcaccagcgagtccgccacccccgagagcagcggcggctcaagcggcggcagcagcaccctgaacatcgaggacgagtacagactgcacgagaccagcaaggagcccgacgtgtccctgggctctacctggctgagcgacttcccccaggcctgggccgagaccggcggaatgggcctggccgtgagacaggccccactgatcatcccactgaaggccaccagcacccccgtgagcatcaagcagtaccctatgtcacaggaggccagactgggcatcaagccacacatccagagactgctggaccagggcatcctggtgccctgccagagcccatggaacacccccctgctgcccgtcaagaagcccggcaccaacgactacaggcccgtgcaggacctgcgggaggtgaacaagcgcgtggaggacatccaccctaccgtgcccaacccctacaacctgctgtccggcctgccacccagccatcagtggtacaccgtgctggacctgaaggacgccttcttctgcctgagactgcaccccacctcccagcctctgttcgccttcgagtggagagaccccgagatgggcatctccggccagctgacttggacaagactgccccagggcttcaagaattctccaaccctgttcaacgaggccctgcaccgggacctggccgacttcaggatccagcacccagacctgatcctgctgcagtacgtggacgacctgctgctggccgccaccagcgagctcgactgccagcagggcacccgggccctgctgcagactctgggcaacctgggctacagggccagcgccaagaaggcccagatctgccagaagcaggtgaagtacctgggctacctgctgaaggagggccagaggtggctgaccgaggccaggaaggagaccgtgatgggccagccaacccctaagacccccagacagctgagggagttcctgggcaaggccggcttctgccggctgttcatccccggcttcgccgagatggccgcccccctgtaccccctgaccaagcctggcaccctgttcaactggggccccgaccagcagaaggcctaccaggagatcaagcaggccctgctgaccgcccccgccctgggcctgcccgatctgaccaagccattcgagctgttcgtggacgagaaacagggctacgccaagggcgtgctgacccagaagctgggcccctggaggagacctgtggcctacctgagcaaaaagctggacccagtggccgccgggtggcccccctgcctgagaatggtggccgccatcgccgtgctgaccaaggacgccggcaagctgaccatgggacagcctctggtgatcctggccccccacgccgtggaggccctggtgaagcagccccccgataggtggctgagtaatgcccggatgacccactaccaggccctgctgctggacaccgacagggtgcagttcggccccgtggtggccctgaaccccgccaccctgctgccactgcccgaggagggcctgcagcataactgcctggacatcctggccgaggcccacggcaccaggcccgacctgaccgatcagcctctgcccgacgccgatcacacctggtacaccgatggcagcagcctgctgcaggagggccagagaaaggccggcgccgccgtgaccaccgagaccgaggtgatctgggccaaggccctgcccgccggcaccagcgcccagcgggccgaactgatcgccctgacccaggccctgaagatggccgagggcaagaagctgaacgtgtacaccgacagccggtacgccttcgccaccgctcacatccacggcgagatttacaggagaagaggctggctgaccagcgaaggcaaggagatcaagaacaaggacgagattctggccctgctgaaggccctgttcctgcctaagagactgtctatcatccactgccccggccaccagaaaggccacagcgccgaggccaggggcaacaggatggccgaccaggccgcccggaaggccgccatcaccgagacccccgacaccagcaccctgctgatcgagaactccagccct

SEQ ID NO: 267 - DNA, 17 bp, synthetic construct
  misc_feature 1..17: note = Description of Artificial Sequence: Synthetic polynucleotide
  source 1..17: mol_type = other DNA
taatacgactcactata

SEQ ID NO: 268 - DNA, 47 bp, synthetic construct
  misc_feature 1..47: note = Description of Artificial Sequence: Synthetic polynucleotide
  source 1..47: mol_type = other DNA
aggaaataagagagaaaagaagagtaagaagaaatataagagccacc

SEQ ID NO: 269-272 - skipped (4 entries)

SEQ ID NO: 273 - DNA, 109 bp, synthetic construct
  misc_feature 1..109: note = Description of Artificial Sequence: Synthetic polynucleotide
  source 1..109: mol_type = other DNA
gcggccgcttaattaagctgccttctgcggggcttgccttctggccaagcccttcttctctcccttgcacctgtacctcttggtctttgaataaagcctgagtaggaag

SEQ ID NO: 274 - DNA, 6507 bp, synthetic construct
  misc_feature 1..6507: note = Description of Artificial Sequence: Synthetic polynucleotide
  source 1..6507: mol_type = other DNA
aggaaataagagagaaaagaagagtaagaagaaatataagagccaccatgaaacggacagccgacggaagcgagttcgagtcaccaaagaagaagcggaaagtcgacaagaagtacagcatcggcctggacatcggcaccaactctgtgggctgggccgtgatcaccgacgagtacaaggtgcccagcaagaaattcaaggtgctgggcaacaccgaccggcacagcatcaagaagaacctgatcggagccctgctgttcgacagcggcgaaacagccgaggccacccggctgaagagaaccgccagaagaagatacaccagacggaagaaccggatctgctatctgcaagagatcttcagcaacgagatggccaaggtggacgacagcttcttccacagactggaagagtccttcctggtggaagaggataagaagcacgagcggcaccccatcttcggcaacatcgtggacgaggtggcctaccacgagaagtaccccaccatctaccacctgagaaagaaactggtggacagcaccgacaaggccgacctgcggctgatctatctggccctggcccacatgatcaagttccggggccacttcctgatcgagggcgacctgaaccccgacaacagcgacgtggacaagctgttcatccagctggtgcagacctacaaccagctgttcgaggaaaaccccatcaacgccagcggcgtggacgccaaggccatcctgtctgccagactgagcaagagcagacggctggaaaatctgatcgcccagctgcccggcgagaagaagaatggcctgttcggaaacctgattgccctgagcctgggcctgacccccaacttcaagagcaacttcgacctggccgaggatgccaaactgcagctgagcaaggacacctacgacgacgacctggacaacctgctggcccagatcggcgaccagtacgccgacctgtttctggccgccaagaacctgtccgacgccatcctgctgagcgacatcctgagagtgaacaccgagatcaccaaggcccccctgagcgcctctatgatcaagagatacgacgagcaccaccaggacctgaccctgctgaaagctctcgtgcggcagcagctgcctgagaagtacaaagagattttcttcgaccagagcaagaacggctacgccggctacattgacggcggagccagccaggaagagttctacaagttcatcaagcccatcctggaaaagatggacggcaccgaggaactgctcgtgaagctgaacagagaggacctgctgcggaagcagcggaccttcgacaacggcagcatcccccaccagatccacctgggagagctgcacgccattctgcggcggcaggaagatttttacccattcctgaaggacaaccgggaaaagatcgagaagatcctgaccttccgcatcccctactacgtgggccctctggccaggggaaacagcagattcgcctggatgaccagaaagagcgaggaaaccatcaccccctggaacttcgaggaagtggtggacaagggcgcttccgcccagagcttcatcgagcggatgaccaacttcgataagaacctgcccaacgagaaggtgctgcccaagcacagcctgctgtacgagtacttcaccgtgtataacgagctgaccaaagtgaaatacgtgaccgagggaatgagaaagcccgccttcctgagcggcgagcagaaaaaggccatcgtggacctgctgttcaagaccaaccggaaagtgaccgtgaagcagctgaaagaggactacttcaagaaaatcgagtgcttcgactccgtggaaatctccggcgtggaagatcggttcaacgcctccctgggcacataccacgatctgctgaaaattatcaaggacaaggacttcctggacaatgaggaaaacgaggacattctggaagatatcgtgctgaccctgacactgtttgaggacagagagatgatcgaggaacggctgaaaacctatgcccacctgttcgacgacaaagtgatgaagcagctgaagcggcggagatacaccggctggggcaggctgagccggaagctgatcaacggcatccgggacaagcagtccggcaagacaatcctggatttcctgaagtccgacggcttcgccaacagaaacttcatgcagctgatccacgacgacagcctgacctttaaagaggacatccagaaagcccaggtgtccggccagggcgatagcctgcacgagcacattgccaatctggccggcagccccgccattaagaagggcatcctgcagacagtgaaggtggtggacgagctcgtgaaagtgatgggccggcacaagcccgagaacatcgtgatcgaaatggccagagagaaccagaccacccagaagggacagaagaacagccgcgagagaatgaagcggatcgaagagggcatcaaagagctgggcagccagatcctgaaagaacaccccgtggaaaacacccagctgcagaacgagaagctgtacctgtactacctgcagaatgggcgggatatgtacgtggaccaggaactggacatcaaccggctgtccgactacgatgtggacgctatcgtgcctcagagctttctgaaggacgactccatcgacaacaaggtgctgaccagaagcgacaagaaccggggcaagagcgacaacgtgccctccgaagaggtcgtgaagaagatgaagaactactggcggcagctgctgaacgccaagctgattacccagagaaagttcgacaatctgaccaaggccgagagaggcggcctgagcgaactggataaggccggcttcatcaagagacagctggtggaaacccggcagatcacaaagcacgtggcacagatcctggactcccggatgaacactaagtacgacgagaatgacaagctgatccgggaagtgaaagtgatcaccctgaagtccaagctggtgtccgatttccggaaggatttccagttttacaaagtgcgcgagatcaacaactaccaccacgcccacgacgcctacctgaacgccgtcgtgggaaccgccctgatcaaaaagtaccctaagctggaaagcgagttcgtgtacggcgactacaaggtgtacgacgtgcggaagatgatcgccaagagcgagcaggaaatcggcaaggctaccgccaagtacttcttctacagcaacatcatgaactttttcaagaccgagattaccctggccaacggcgagatccggaagcggcctctgatcgagacaaacggcgaaaccggggagatcgtgtgggataagggccgggattttgccaccgtgcggaaagtgctgagcatgccccaagtgaatatcgtgaaaaagaccgaggtgcagacaggcggcttcagcaaagagtctatcctgcccaagaggaacagcgataagctgatcgccagaaagaaggactgggaccctaagaagtacggcggcttcgacagccccaccgtggcctattctgtgctggtggtggccaaagtggaaaagggcaagtccaagaaactgaagagtgtgaaagagctgctggggatcaccatcatggaaagaagcagcttcgagaagaatcccatcgactttctggaagccaagggctacaaagaagtgaaaaaggacctgatcatcaagctgcctaagtactccctgttcgagctggaaaacggccggaagagaatgctggcctctgccggcgaactgcagaagggaaacgaactggccctgccctccaaatatgtgaacttcctgtacctggccagccactatgagaagctgaagggctcccccgaggataatgagcagaaacagctgtttgtggaacagcacaagcactacctggacgagatcatcgagcagatcagcgagttctccaagagagtgatcctggccgacgctaatctggacaaagtgctgtccgcctacaacaagcaccgggataagcccatcagagagcaggccgagaatatcatccacctgtttaccctgaccaatctgggagcccctgccgccttcaagtactttgacaccaccatcgaccggaagaggtacaccagcaccaaagaggtgctggacgccaccctgatccaccagagcatcaccggcctgtacgagacacggatcgacctgtctcagctgggaggtgactccggcggctcctccggcggaagcagcggcggcagcagcggcggaagcagcggcggcagcagcggcggaagctctggcggatctagcggcggctctaccctgaacatcgaggacgagtacaggctgcacgagaccagcaaggagcccgacgtgagcctgggcagcacctggctgagcgatttccctcaggcttgggccgagaccggcggcatgggcctggccgtgcggcaggcccccctgattatccccctgaaggccaccagcacccccgtgagcatcaagcagtacccaatgtcccaggaggccaggctgggcatcaagcctcacatccagaggctgctggaccagggcatcctggtgccatgccagtccccctggaacacccctctgctgcccgtgaagaagcctggcaccaacgactaccggcccgtgcaggacctgagagaagtgaacaagcgggtggaggacatccacccaaccgtgcccaacccttacaacctgctgtccggcctgccccccagccaccagtggtacaccgtgctggacctgaaggacgccttcttctgcctgagactgcaccccacctctcagcccctgttcgccttcgagtggcgcgaccccgagatgggcatcagcggccagctgacctggaccagactgccacagggctttaagaatagcccaaccctgtttaacgaggccctgcacagggacctggccgacttcaggatccagcaccccgacctgattctgctgcagtacgtggacgacctgctgctggccgctaccagcgagctggactgccagcagggcaccagagccctgctgcagaccctgggcaacctgggctacagagccagcgccaagaaggcccagatctgtcagaagcaggtgaagtatctgggctacctgctgaaggaaggccagagatggctgaccgaggccagaaaggagactgtgatgggccagcccacccccaagacccccaggcagctgcgggagttcctgggcaaggccggcttttgcagactgtttatccctggcttcgccgagatggccgccccactgtaccctctgaccaagcctggcaccctgtttaactggggccccgaccagcagaaggcctaccaggagatcaagcaggccctgctgaccgcccccgccctgggcctgcccgacctgaccaagcctttcgagctgttcgtggacgagaagcagggatacgccaaaggcgtgctgacccagaagctgggcccctggcggaggcccgtggcctacctgagcaaaaaactggaccctgtggccgccggctggcccccatgcctgcggatggtggccgccatcgctgtgctgaccaaggacgccggcaagctgaccatgggccagcccctggtgatcctggcccctcacgccgtggaggctctggtgaagcagcctccagacaggtggctgtccaacgccaggatgacccactaccaggccctgctgctggacaccgaccgggtgcagttcggccctgtggtggccctgaaccccgccaccctgctgcctctgccagaggagggcctgcagcacaactgcctggacatcctggccgaggcccacggcaccaggcccgacctgaccgaccagcccctgcctgacgccgaccacacctggtacaccgacggcagctccctgctgcaggagggccagaggaaggccggcgccgccgtgaccaccgagaccgaggtgatctgggccaaagccctgcctgccggcacctccgcccagcgggccgagctgatcgccctgacccaggccctgaagatggctgagggcaagaagctgaacgtgtacaccgattccagatacgccttcgccaccgcccacatccacggcgagatctacagaagaaggggctggctgacctccgagggcaaggagatcaagaacaaggacgagattctggccctgctgaaggccctgttcctgcctaagagactgagcatcatccactgtcccggccaccagaagggccacagcgccgaggccagaggcaatagaatggccgaccaggccgccagaaaggccgccatcaccgagacccccgacaccagcaccctgctgatcgagaacagcagccccagcggcggctccaaacgcaccgccgacgggagcgagttcgagcccaagaagaagaggaaagtctaagcggccgcttaattaagctgccttctgcggggcttgccttctggccaagcccttcttctctcccttgcacctgtacctcttggtctttgaataaagcctgagtaggaag

SEQ ID NO: 275 - DNA, 6513 bp, synthetic construct
  misc_feature 1..6513: note = Description of Artificial Sequence: Synthetic polynucleotide
  source 1..6513: mol_type = other DNA
aggaaataagagagaaaagaagagtaagaagaaatataagagccaccatgaaacggacagccgacggaagcgagttcgagtcaccaaagaagaagcggaaagtcgacaagaagtacagcatcggcctggacatcggcaccaactctgtgggctgggccgtgatcaccgacgagtacaaggtgcccagcaagaaattcaaggtgctgggcaacaccgaccggcacagcatcaagaagaacctgatcggagccctgctgttcgacagcggcgaaacagccgaggccacccggctgaagagaaccgccagaagaagatacaccagacggaagaaccggatctgctatctgcaagagatcttcagcaacgagatggccaaggtggacgacagcttcttccacagactggaagagtccttcctggtggaagaggataagaagcacgagcggcaccccatcttcggcaacatcgtggacgaggtggcctaccacgagaagtaccccaccatctaccacctgagaaagaaactggtggacagcaccgacaaggccgacctgcggctgatctatctggccctggcccacatgatcaagttccggggccacttcctgatcgagggcgacctgaaccccgacaacagcgacgtggacaagctgttcatccagctggtgcagacctacaaccagctgttcgaggaaaaccccatcaacgccagcggcgtggacgccaaggccatcctgtctgccagactgagcaagagcagacggctggaaaatctgatcgcccagctgcccggcgagaagaagaatggcctgttcggaaacctgattgccctgagcctgggcctgacccccaacttcaagagcaacttcgacctggccgaggatgccaaactgcagctgagcaaggacacctacgacgacgacctggacaacctgctggcccagatcggcgaccagtacgccgacctgtttctggccgccaagaacctgtccgacgccatcctgctgagcgacatcctgagagtgaacaccgagatcaccaaggcccccctgagcgcctctatgatcaagagatacgacgagcaccaccaggacctgaccctgctgaaagctctcgtgcggcagcagctgcctgagaagtacaaagagattttcttcgaccagagcaagaacggctacgccggctacattgacggcggagccagccaggaagagttctacaagttcatcaagcccatcctggaaaagatggacggcaccgaggaactgctcgtgaagctgaacagagaggacctgctgcggaagcagcggaccttcgacaacggcagcatcccccaccagatccacctgggagagctgcacgccattctgcggcggcaggaagatttttacccattcctgaaggacaaccgggaaaagatcgagaagatcctgaccttccgcatcccctactacgtgggccctctggccaggggaaacagcagattcgcctggatgaccagaaagagcgaggaaaccatcaccccctggaacttcgaggaagtggtggacaagggcgcttccgcccagagcttcatcgagcggatgaccaacttcgataagaacctgcccaacgagaaggtgctgcccaagcacagcctgctgtacgagtacttcaccgtgtataacgagctgaccaaagtgaaatacgtgaccgagggaatgagaaagcccgccttcctgagcggcgagcagaaaaaggccatcgtggacctgctgttcaagaccaaccggaaagtgaccgtgaagcagctgaaagaggactacttcaagaaaatcgagtgcttcgactccgtggaaatctccggcgtggaagatcggttcaacgcctccctgggcacataccacgatctgctgaaaattatcaaggacaaggacttcctggacaatgaggaaaacgaggacattctggaagatatcgtgctgaccctgacactgtttgaggacagagagatgatcgaggaacggctgaaaacctatgcccacctgttcgacgacaaagtgatgaagcagctgaagcggcggagatacaccggctggggcaggctgagccggaagctgatcaacggcatccgggacaagcagtccggcaagacaatcctggatttcctgaagtccgacggcttcgccaacagaaacttcatgcagctgatccacgacgacagcctgacctttaaagaggacatccagaaagcccaggtgtccggccagggcgatagcctgcacgagcacattgccaatctggccggcagccccgccattaagaagggcatcctgcagacagtgaaggtggtggacgagctcgtgaaagtgatgggccggcacaagcccgagaacatcgtgatcgaaatggccagagagaaccagaccacccagaagggacagaagaacagccgcgagagaatgaagcggatcgaagagggcatcaaagagctgggcagccagatcctgaaagaacaccccgtggaaaacacccagctgcagaacgagaagctgtacctgtactacctgcagaatgggcgggatatgtacgtggaccaggaactggacatcaaccggctgtccgactacgatgtggacgctatcgtgcctcagagctttctgaaggacgactccatcgacaacaaggtgctgaccagaagcgacaagaaccggggcaagagcgacaacgtgccctccgaagaggtcgtgaagaagatgaagaactactggcggcagctgctgaacgccaagctgattacccagagaaagttcgacaatctgaccaaggccgagagaggcggcctgagcgaactggataaggccggcttcatcaagagacagctggtggaaacccggcagatcacaaagcacgtggcacagatcctggactcccggatgaacactaagtacgacgagaatgacaagctgatccgggaagtgaaagtgatcaccctgaagtccaagctggtgtccgatttccggaaggatttccagttttacaaagtgcgcgagatcaacaactaccaccacgcccacgacgcctacctgaacgccgtcgtgggaaccgccctgatcaaaaagtaccctaagctggaaagcgagttcgtgtacggcgactacaaggtgtacgacgtgcggaagatgatcgccaagagcgagcaggaaatcggcaaggctaccgccaagtacttcttctacagcaacatcatgaactttttcaagaccgagattaccctggccaacggcgagatccggaagcggcctctgatcgagacaaacggcgaaaccggggagatcgtgtgggataagggccgggattttgccaccgtgcggaaagtgctgagcatgccccaagtgaatatcgtgaaaaagaccgaggtgcagacaggcggcttcagcaaagagtctatcctgcccaagaggaacagcgataagctgatcgccagaaagaaggactgggaccctaagaagtacggcggcttcgacagccccaccgtggcctattctgtgctggtggtggccaaagtggaaaagggcaagtccaagaaactgaagagtgtgaaagagctgctggggatcaccatcatggaaagaagcagcttcgagaagaatcccatcgactttctggaagccaagggctacaaagaagtgaaaaaggacctgatcatcaagctgcctaagtactccctgttcgagctggaaaacggccggaagagaatgctggcctctgccggcgaactgcagaagggaaacgaactggccctgccctccaaatatgtgaacttcctgtacctggccagccactatgagaagctgaagggctcccccgaggataatgagcagaaacagctgtttgtggaacagcacaagcactacctggacgagatcatcgagcagatcagcgagttctccaagagagtgatcctggccgacgctaatctggacaaagtgctgtccgcctacaacaagcaccgggataagcccatcagagagcaggccgagaatatcatccacctgtttaccctgaccaatctgggagcccctgccgccttcaagtactttgacaccaccatcgaccggaagaggtacaccagcaccaaagaggtgctggacgccaccctgatccaccagagcatcaccggcctgtacgagacacggatcgacctgtctcagctgggaggtgactccggcggctcctccggcggaagcagcggcggcagcagcggcggaagcagcggcggcagcagcggcggaagctctggcggatctagcggcggctctaccctgaacatcgaggacgagtacaggctgcacgagaccagcaaggagcccgacgtgagcctgggcagcacctggctgagcgatttccctcaggcttgggccgagaccggcggcatgggcctggccgtgcggcaggcccccctgattatccccctgaaggccaccagcacccccgtgagcatcaagcagtacccaatgtcccaggaggccaggctgggcatcaagcctcacatccagaggctgctggaccagggcatcctggtgccatgccagtccccctggaacacccctctgctgcccgtgaagaagcctggcaccaacgactaccggcccgtgcaggacctgagagaagtgaacaagcgggtggaggacatccacccaaccgtgcccaacccttacaacctgctgtccggcctgccccccagccaccagtggtacaccgtgctggacctgaaggacgccttcttctgcctgagactgcaccccacctctcagcccctgttcgccttcgagtggcgcgaccccgagatgggcatcagcggccagctgacctggaccagactgccacagggctttaagaatagcccaaccctgtttaacgaggccctgcacagggacctggccgacttcaggatccagcaccccgacctgattctgctgcagtacgtggacgacctgctgctggccgctaccagcgagctggactgccagcagggcaccagagccctgctgcagaccctgggcaacctgggctacagagccagcgccaagaaggcccagatctgtcagaagcaggtgaagtatctgggctacctgctgaaggaaggccagagatggctgaccgaggccagaaaggagactgtgatgggccagcccacccccaagacccccaggcagctgcgggagttcctgggcaaggccggcttttgcagactgtttatccctggcttcgccgagatggccgccccactgtaccctctgaccaagcctggcaccctgtttaactggggccccgaccagcagaaggcctaccaggagatcaagcaggccctgctgaccgcccccgccctgggcctgcccgacctgaccaagcctttcgagctgttcgtggacgagaagcagggatacgccaaaggcgtgctgacccagaagctgggcccctggcggaggcccgtggcctacctgagcaaaaaactggaccctgtggccgccggctggcccccatgcctgcggatggtggccgccatcgctgtgctgaccaaggacgccggcaagctgaccatgggccagcccctggtgatcctggcccctcacgccgtggaggctctggtgaagcagcctccagacaggtggctgtccaacgccaggatgacccactaccaggccctgctgctggacaccgaccgggtgcagttcggccctgtggtggccctgaaccccgccaccctgctgcctctgccagaggagggcctgcagcacaactgcctggacatcctggccgaggcccacggcaccaggcccgacctgaccgaccagcccctgcctgacgccgaccacacctggtacaccgacggcagctccctgctgcaggagggccagaggaaggccggcgccgccgtgaccaccgagaccgaggtgatctgggccaaagccctgcctgccggcacctccgcccagcgggccgagctgatcgccctgacccaggccctgaagatggctgagggcaagaagctgaacgtgtacaccgattccagatacgccttcgccaccgcccacatccacggcgagatctacagaagaaggggctggctgacctccgagggcaaggagatcaagaacaaggacgagattctggccctgctgaaggccctgttcctgcctaagagactgagcatcatccactgtcccggccaccagaagggccacagcgccgaggccagaggcaatagaatggccgaccaggccgccagaaaggccgccatcaccgagacccccgacaccagcaccctgctgatcgagaacagcagccccagcggcggctccaaacgcaccgccgacgggagcgagttcgagcccaagaagaagaggaaagtctaatagtgagcggccgcttaattaagctgccttctgcggggcttgccttctggccaagcccttcttctctcccttgcacctgtacctcttggtctttgaataaagcctgagtaggaag

SEQ ID NO: 276 - DNA, 6351 bp, synthetic construct
  misc_feature 1..6351: note = Description of Artificial Sequence: Synthetic polynucleotide
  source 1..6351: mol_type = other DNA
atgaaacggacagccgacggaagcgagttcgagtcaccaaagaagaagcggaaagtcgacaagaagtacagcatcggcctggacatcggcaccaactctgtgggctgggccgtgatcaccgacgagtacaaggtgcccagcaagaaattcaaggtgctgggcaacaccgaccggcacagcatcaagaagaacctgatcggagccctgctgttcgacagcggcgaaacagccgaggccacccggctgaagagaaccgccagaagaagatacaccagacggaagaaccggatctgctatctgcaagagatcttcagcaacgagatggccaaggtggacgacagcttcttccacagactggaagagtccttcctggtggaagaggataagaagcacgagcggcaccccatcttcggcaacatcgtggacgaggtggcctaccacgagaagtaccccaccatctaccacctgagaaagaaactggtggacagcaccgacaaggccgacctgcggctgatctatctggccctggcccacatgatcaagttccggggccacttcctgatcgagggcgacctgaaccccgacaacagcgacgtggacaagctgttcatccagctggtgcagacctacaaccagctgttcgaggaaaaccccatcaacgccagcggcgtggacgccaaggccatcctgtctgccagactgagcaagagcagacggctggaaaatctgatcgcccagctgcccggcgagaagaagaatggcctgttcggaaacctgattgccctgagcctgggcctgacccccaacttcaagagcaacttcgacctggccgaggatgccaaactgcagctgagcaaggacacctacgacgacgacctggacaacctgctggcccagatcggcgaccagtacgccgacctgtttctggccgccaagaacctgtccgacgccatcctgctgagcgacatcctgagagtgaacaccgagatcaccaaggcccccctgagcgcctctatgatcaagagatacgacgagcaccaccaggacctgaccctgctgaaagctctcgtgcggcagcagctgcctgagaagtacaaagagattttcttcgaccagagcaagaacggctacgccggctacattgacggcggagccagccaggaagagttctacaagttcatcaagcccatcctggaaaagatggacggcaccgaggaactgctcgtgaagctgaacagagaggacctgctgcggaagcagcggaccttcgacaacggcagcatcccccaccagatccacctgggagagctgcacgccattctgcggcggcaggaagatttttacccattcctgaaggacaaccgggaaaagatcgagaagatcctgaccttccgcatcccctactacgtgggccctctggccaggggaaacagcagattcgcctggatgaccagaaagagcgaggaaaccatcaccccctggaacttcgaggaagtggtggacaagggcgcttccgcccagagcttcatcgagcggatgaccaacttcgataagaacctgcccaacgagaaggtgctgcccaagcacagcctgctgtacgagtacttcaccgtgtataacgagctgaccaaagtgaaatacgtgaccgagggaatgagaaagcccgccttcctgagcggcgagcagaaaaaggccatcgtggacctgctgttcaagaccaaccggaaagtgaccgtgaagcagctgaaagaggactacttcaagaaaatcgagtgcttcgactccgtggaaatctccggcgtggaagatcggttcaacgcctccctgggcacataccacgatctgctgaaaattatcaaggacaaggacttcctggacaatgaggaaaacgaggacattctggaagatatcgtgctgaccctgacactgtttgaggacagagagatgatcgaggaacggctgaaaacctatgcccacctgttcgacgacaaagtgatgaagcagctgaagcggcggagatacaccggctggggcaggctgagccggaagctgatcaacggcatccgggacaagcagtccggcaagacaatcctggatttcctgaagtccgacggcttcgccaacagaaacttcatgcagctgatccacgacgacagcctgacctttaaagaggacatccagaaagcccaggtgtccggccagggcgatagcctgcacgagcacattgccaatctggccggcagccccgccattaagaagggcatcctgcagacagtgaaggtggtggacgagctcgtgaaagtgatgggccggcacaagcccgagaacatcgtgatcgaaatggccagagagaaccagaccacccagaagggacagaagaacagccgcgagagaatgaagcggatcgaagagggcatcaaagagctgggcagccagatcctgaaagaacaccccgtggaaaacacccagctgcagaacgagaagctgtacctgtactacctgcagaatgggcgggatatgtacgtggaccaggaactggacatcaaccggctgtccgactacgatgtggacgctatcgtgcctcagagctttctgaaggacgactccatcgacaacaaggtgctgaccagaagcgacaagaaccggggcaagagcgacaacgtgccctccgaagaggtcgtgaagaagatgaagaactactggcggcagctgctgaacgccaagctgattacccagagaaagttcgacaatctgaccaaggccgagagaggcggcctgagcgaactggataaggccggcttcatcaagagacagctggtggaaacccggcagatcacaaagcacgtggcacagatcctggactcccggatgaacactaagtacgacgagaatgacaagctgatccgggaagtgaaagtgatcaccctgaagtccaagctggtgtccgatttccggaaggatttccagttttacaaagtgcgcgagatcaacaactaccaccacgcccacgacgcctacctgaacgccgtcgtgggaaccgccctgatcaaaaagtaccctaagctggaaagcgagttcgtgtacggcgactacaaggtgtacgacgtgcggaagatgatcgccaagagcgagcaggaaatcggcaaggctaccgccaagtacttcttctacagcaacatcatgaactttttcaagaccgagattaccctggccaacggcgagatccggaagcggcctctgatcgagacaaacggcgaaaccggggagatcgtgtgggataagggccgggattttgccaccgtgcggaaagtgctgagcatgccccaagtgaatatcgtgaaaaagaccgaggtgcagacaggcggcttcagcaaagagtctatcctgcccaagaggaacagcgataagctgatcgccagaaagaaggactgggaccctaagaagtacggcggcttcgacagccccaccgtggcctattctgtgctggtggtggccaaagtggaaaagggcaagtccaagaaactgaagagtgtgaaagagctgctggggatcaccatcatggaaagaagcagcttcgagaagaatcccatcgactttctggaagccaagggctacaaagaagtgaaaaaggacctgatcatcaagctgcctaagtactccctgttcgagctggaaaacggccggaagagaatgctggcctctgccggcgaactgcagaagggaaacgaactggccctgccctccaaatatgtgaacttcctgtacctggccagccactatgagaagctgaagggctcccccgaggataatgagcagaaacagctgtttgtggaacagcacaagcactacctggacgagatcatcgagcagatcagcgagttctccaagagagtgatcctggccgacgctaatctggacaaagtgctgtccgcctacaacaagcaccgggataagcccatcagagagcaggccgagaatatcatccacctgtttaccctgaccaatctgggagcccctgccgccttcaagtactttgacaccaccatcgaccggaagaggtacaccagcaccaaagaggtgctggacgccaccctgatccaccagagcatcaccggcctgtacgagacacggatcgacctgtctcagctgggaggtgactccggcggctcctccggcggaagcagcggcggcagcagcggcggaagcagcggcggcagcagcggcggaagctctggcggatctagcggcggctctaccctgaacatcgaggacgagtacaggctgcacgagaccagcaaggagcccgacgtgagcctgggcagcacctggctgagcgatttccctcaggcttgggccgagaccggcggcatgggcctggccgtgcggcaggcccccctgattatccccctgaaggccaccagcacccccgtgagcatcaagcagtacccaatgtcccaggaggccaggctgggcatcaagcctcacatccagaggctgctggaccagggcatcctggtgccatgccagtccccctggaacacccctctgctgcccgtgaagaagcctggcaccaacgactaccggcccgtgcaggacctgagagaagtgaacaagcgggtggaggacatccacccaaccgtgcccaacccttacaacctgctgtccggcctgccccccagccaccagtggtacaccgtgctggacctgaaggacgccttcttctgcctgagactgcaccccacctctcagcccctgttcgccttcgagtggcgcgaccccgagatgggcatcagcggccagctgacctggaccagactgccacagggctttaagaatagcccaaccctgtttaacgaggccctgcacagggacctggccgacttcaggatccagcaccccgacctgattctgctgcagtacgtggacgacctgctgctggccgctaccagcgagctggactgccagcagggcaccagagccctgctgcagaccctgggcaacctgggctacagagccagcgccaagaaggcccagatctgtcagaagcaggtgaagtatctgggctacctgctgaaggaaggccagagatggctgaccgaggccagaaaggagactgtgatgggccagcccacccccaagacccccaggcagctgcgggagttcctgggcaaggccggcttttgcagactgtttatccctggcttcgccgagatggccgccccactgtaccctctgaccaagcctggcaccctgtttaactggggccccgaccagcagaaggcctaccaggagatcaagcaggccctgctgaccgcccccgccctgggcctgcccgacctgaccaagcctttcgagctgttcgtggacgagaagcagggatacgccaaaggcgtgctgacccagaagctgggcccctggcggaggcccgtggcctacctgagcaaaaaactggaccctgtggccgccggctggcccccatgcctgcggatggtggccgccatcgctgtgctgaccaaggacgccggcaagctgaccatgggccagcccctggtgatcctggcccctcacgccgtggaggctctggtgaagcagcctccagacaggtggctgtccaacgccaggatgacccactaccaggccctgctgctggacaccgaccgggtgcagttcggccctgtggtggccctgaaccccgccaccctgctgcctctgccagaggagggcctgcagcacaactgcctggacatcctggccgaggcccacggcaccaggcccgacctgaccgaccagcccctgcctgacgccgaccacacctggtacaccgacggcagctccctgctgcaggagggccagaggaaggccggcgccgccgtgaccaccgagaccgaggtgatctgggccaaagccctgcctgccggcacctccgcccagcgggccgagctgatcgccctgacccaggccctgaagatggctgagggcaagaagctgaacgtgtacaccgattccagatacgccttcgccaccgcccacatccacggcgagatctacagaagaaggggctggctgacctccgagggcaaggagatcaagaacaaggacgagattctggccctgctgaaggccctgttcctgcctaagagactgagcatcatccactgtcccggccaccagaagggccacagcgccgaggccagaggcaatagaatggccgaccaggccgccagaaaggccgccatcaccgagacccccgacaccagcaccctgctgatcgagaacagcagccccagcggcggctccaaacgcaccgccgacgggagcgagttcgagcccaagaagaagaggaaagtctaa

SEQ ID NO: 277 - RNA, 6351 nt, synthetic construct
  misc_feature 1..6351: note = Description of Artificial Sequence: Synthetic polynucleotide
  source 1..6351: mol_type = other RNA
atgaaacggacagccgacggaagcgagttcgagtcaccaaagaagaagcggaaagtcgacaagaagtacagcatcggcctggacatcggcaccaactctgtgggctgggccgtgatcaccgacgagtacaaggtgcccagcaagaaattcaaggtgctgggcaacaccgaccggcacagcatcaagaagaacctgatcggagccctgctgttcgacagcggcgaaacagccgaggccacccggctgaagagaaccgccagaagaagatacaccagacggaagaaccggatctgctatctgcaagagatcttcagcaacgagatggccaaggtggacgacagcttcttccacagactggaagagtccttcctggtggaagaggataagaagcacgagcggcaccccatcttcggcaacatcgtggacgaggtggcctaccacgagaagtaccccaccatctaccacctgagaaagaaactggtggacagcaccgacaaggccgacctgcggctgatctatctggccctggcccacatgatcaagttccggggccacttcctgatcgagggcgacctgaaccccgacaacagcgacgtggacaagctgttcatccagctggtgcagacctacaaccagctgttcgaggaaaaccccatcaacgccagcggcgtggacgccaaggccatcctgtctgccagactgagcaagagcagacggctggaaaatctgatcgcccagctgcccggcgagaagaagaatggcctgttcggaaacctgattgccctgagcctgggcctgacccccaacttcaagagcaacttcgacctggccgaggatgccaaactgcagctgagcaaggacacctacgacgacgacctggacaacctgctggcccagatcggcgaccagtacgccgacctgtttctggccgccaagaacctgtccgacgccatcctgctgagcgacatcctgagagtgaacaccgagatcaccaaggcccccctgagcgcctctatgatcaagagatacgacgagcaccaccaggacctgaccctgctgaaagctctcgtgcggcagcagctgcctgagaagtacaaagagattttcttcgaccagagcaagaacggctacgccggctacattgacggcggagccagccaggaagagttctacaagttcatcaagcccatcctggaaaagatggacggcaccgaggaactgctcgtgaagctgaacagagaggacctgctgcggaagcagcggaccttcgacaacggcagcatcccccaccagatccacctgggagagctgcacgccattctgcggcggcaggaagatttttacccattcctgaaggacaaccgggaaaagatcgagaagatcctgaccttccgcatcccctactacgtgggccctctggccaggggaaacagcagattcgcctggatgaccagaaagagcgaggaaaccatcaccccctggaacttcgaggaagtggtggacaagggcgcttccgcccagagcttcatcgagcggatgaccaacttcgataagaacctgcccaacgagaaggtgctgcccaagcacagcctgctgtacgagtacttcaccgtgtataacgagctgaccaaagtgaaatacgtgaccgagggaatgagaaagcccgccttcctgagcggcgagcagaaaaaggccatcgtggacctgctgttcaagaccaaccggaaagtgaccgtgaagcagctgaaagaggactacttcaagaaaatcgagtgcttcgactccgtggaaatctccggcgtggaagatcggttcaacgcctccctgggcacataccacgatctgctgaaaattatcaaggacaaggacttcctggacaatgaggaaaacgaggacattctggaagatatcgtgctgaccctgacactgtttgaggacagagagatgatcgaggaacggctgaaaacctatgcccacctgttcgacgacaaagtgatgaagcagctgaagcggcggagatacaccggctggggcaggctgagccggaagctgatcaacggcatccgggacaagcagtccggcaagacaatcctggatttcctgaagtccgacggcttcgccaacagaaacttcatgcagctgatccacgacgacagcctgacctttaaagaggacatccagaaagcccaggtgtccggccagggcgatagcctgcacgagcacattgccaatctggccggcagccccgccattaagaagggcatcctgcagacagtgaaggtggtggacgagctcgtgaaagtgatgggccggcacaagcccgagaacatcgtgatcgaaatggccagagagaaccagaccacccagaagggacagaagaacagccgcgagagaatgaagcggatcgaagagggcatcaaagagctgggcagccagatcctgaaagaacaccccgtggaaaacacccagctgcagaacgagaagctgtacctgtactacctgcagaatgggcgggatatgtacgtggaccaggaactggacatcaaccggctgtccgactacgatgtggacgctatcgtgcctcagagctttctgaaggacgactccatcgacaacaaggtgctgaccagaagcgacaagaaccggggcaagagcgacaacgtgccctccgaagaggtcgtgaagaagatgaagaactactggcggcagctgctgaacgccaagctgattacccagagaaagttcgacaatctgaccaaggccgagagaggcggcctgagcgaactggataaggccggcttcatcaagagacagctggtggaaacccggcagatcacaaagcacgtggcacagatcctggactcccggatgaacactaagtacgacgagaatgacaagctgatccgggaagtgaaagtgatcaccctgaagtccaagctggtgtccgatttccggaaggatttccagttttacaaagtgcgcgagatcaacaactaccaccacgcccacgacgcctacctgaacgccgtcgtgggaaccgccctgatcaaaaagtaccctaagctggaaagcgagttcgtgtacggcgactacaaggtgtacgacgtgcggaagatgatcgccaagagcgagcaggaaatcggcaaggctaccgccaagtacttcttctacagcaacatcatgaactttttcaagaccgagattaccctggccaacggcgagatccggaagcggcctctgatcgagacaaacggcgaaaccggggagatcgtgtgggataagggccgggattttgccaccgtgcggaaagtgctgagcatgccccaagtgaatatcgtgaaaaagaccgaggtgcagacaggcggcttcagcaaagagtctatcctgcccaagaggaacagcgataagctgatcgccagaaagaaggactgggaccctaagaagtacggcggcttcgacagccccaccgtggcctattctgtgctggtggtggccaaagtggaaaagggcaagtccaagaaactgaagagtgtgaaagagctgctggggatcaccatcatggaaagaagcagcttcgagaagaatcccatcgactttctggaagccaagggctacaaagaagtgaaaaaggacctgatcatcaagctgcctaagtactccctgttcgagctggaaaacggccggaagagaatgctggcctctgccggcgaactgcagaagggaaacgaactggccctgccctccaaatatgtgaacttcctgtacctggccagccactatgagaagctgaagggctcccccgaggataatgagcagaaacagctgtttgtggaacagcacaagcactacctggacgagatcatcgagcagatcagcgagttctccaagagagtgatcctggccgacgctaatctggacaaagtgctgtccgcctacaacaagcaccgggataagcccatcagagagcaggccgagaatatcatccacctgtttaccctgaccaatctgggagcccctgccgccttcaagtactttgacaccaccatcgaccggaagaggtacaccagcaccaaagaggtgctggacgccaccctgatccaccagagcatcaccggcctgtacgagacacggatcgacctgtctcagctgggaggtgactccggcggctcctccggcggaagcagcggcggcagcagcggcggaagcagcggcggcagcagcggcggaagctctggcggatctagcggcggctctaccctgaacatcgaggacgagtacaggctgcacgagaccagcaaggagcccgacgtgagcctgggcagcacctggctgagcgatttccctcaggcttgggccgagaccggcggcatgggcctggccgtgcggcaggcccccctgattatccccctgaaggccaccagcacccccgtgagcatcaagcagtacccaatgtcccaggaggccaggctgggcatcaagcctcacatccagaggctgctggaccagggcatcctggtgccatgccagtccccctggaacacccctctgctgcccgtgaagaagcctggcaccaacgactaccggcccgtgcaggacctgagagaagtgaacaagcgggtggaggacatccacccaaccgtgcccaacccttacaacctgctgtccggcctgccccccagccaccagtggtacaccgtgctggacctgaaggacgccttcttctgcctgagactgcaccccacctctcagcccctgttcgccttcgagtggcgcgaccccgagatgggcatcagcggccagctgacctggaccagactgccacagggctttaagaatagcccaaccctgtttaacgaggccctgcacagggacctggccgacttcaggatccagcaccccgacctgattctgctgcagtacgtggacgacctgctgctggccgctaccagcgagctggactgccagcagggcaccagagccctgctgcagaccctgggcaacctgggctacagagccagcgccaagaaggcccagatctgtcagaagcaggtgaagtatctgggctacctgctgaaggaaggccagagatggctgaccgaggccagaaaggagactgtgatgggccagcccacccccaagacccccaggcagctgcgggagttcctgggcaaggccggcttttgcagactgtttatccctggcttcgccgagatggccgccccactgtaccctctgaccaagcctggcaccctgtttaactggggccccgaccagcagaaggcctaccaggagatcaagcaggccctgctgaccgcccccgccctgggcctgcccgacctgaccaagcctttcgagctgttcgtggacgagaagcagggatacgccaaaggcgtgctgacccagaagctgggcccctggcggaggcccgtggcctacctgagcaaaaaactggaccctgtggccgccggctggcccccatgcctgcggatggtggccgccatcgctgtgctgaccaaggacgccggcaagctgaccatgggccagcccctggtgatcctggcccctcacgccgtggaggctctggtgaagcagcctccagacaggtggctgtccaacgccaggatgacccactaccaggccctgctgctggacaccgaccgggtgcagttcggccctgtggtggccctgaaccccgccaccctgctgcctctgccagaggagggcctgcagcacaactgcctggacatcctggccgaggcccacggcaccaggcccgacctgaccgaccagcccctgcctgacgccgaccacacctggtacaccgacggcagctccctgctgcaggagggccagaggaaggccggcgccgccgtgaccaccgagaccgaggtgatctgggccaaagccctgcctgccggcacctccgcccagcgggccgagctgatcgccctgacccaggccctgaagatggctgagggcaagaagctgaacgtgtacaccgattccagatacgccttcgccaccgcccacatccacggcgagatctacagaagaaggggctggctgacctccgagggcaaggagatcaagaacaaggacgagattctggccctgctgaaggccctgttcctgcctaagagactgagcatcatccactgtcccggccaccagaagggccacagcgccgaggccagaggcaatagaatggccgaccaggccgccagaaaggccgccatcaccgagacccccgacaccagcaccctgctgatcgagaacagcagccccagcggcggctccaaacgcaccgccgacgggagcgagttcgagcccaagaagaagaggaaagtctaa

SEQ ID NO: 278 - DNA, 6357 bp, synthetic construct
  misc_feature 1..6357: note = Description of Artificial Sequence: Synthetic polynucleotide
  source 1..6357: mol_type = other DNA
atgaaacggacagccgacggaagcgagttcgagtcaccaaagaagaagcggaaagtcgacaagaagtacagcatcggcctggacatcggcaccaactctgtgggctgggccgtgatcaccgacgagtacaaggtgcccagcaagaaattcaaggtgctgggcaacaccgaccggcacagcatcaagaagaacctgatcggagccctgctgttcgacagcggcgaaacagccgaggccacccggctgaagagaaccgccagaagaagatacaccagacggaagaaccggatctgctatctgcaagagatcttcagcaacgagatggccaaggtggacgacagcttcttccacagactggaagagtccttcctggtggaagaggataagaagcacgagcggcaccccatcttcggcaacatcgtggacgaggtggcctaccacgagaagtaccccaccatctaccacctgagaaagaaactggtggacagcaccgacaaggccgacctgcggctgatctatctggccctggcccacatgatcaagttccggggccacttcctgatcgagggcgacctgaaccccgacaacagcgacgtggacaagctgttcatccagctggtgcagacctacaaccagctgttcgaggaaaaccccatcaacgccagcggcgtggacgccaaggccatcctgtctgccagactgagcaagagcagacggctggaaaatctgatcgcccagctgcccggcgagaagaagaatggcctgttcggaaacctgattgccctgagcctgggcctgacccccaacttcaagagcaacttcgacctggccgaggatgccaaactgcagctgagcaaggacacctacgacgacgacctggacaacctgctggcccagatcggcgaccagtacgccgacctgtttctggccgccaagaacctgtccgacgccatcctgctgagcgacatcctgagagtgaacaccgagatcaccaaggcccccctgagcgcctctatgatcaagagatacgacgagcaccaccaggacctgaccctgctgaaagctctcgtgcggcagcagctgcctgagaagtacaaagagattttcttcgaccagagcaagaacggctacgccggctacattgacggcggagccagccaggaagagttctacaagttcatcaagcccatcctggaaaagatggacggcaccgaggaactgctcgtgaagctgaacagagaggacctgctgcggaagcagcggaccttcgacaacggcagcatcccccaccagatccacctgggagagctgcacgccattctgcggcggcaggaagatttttacccattcctgaaggacaaccgggaaaagatcgagaagatcctgaccttccgcatcccctactacgtgggccctctggccaggggaaacagcagattcgcctggatgaccagaaagagcgaggaaaccatcaccccctggaacttcgaggaagtggtggacaagggcgcttccgcccagagcttcatcgagcggatgaccaacttcgataagaacctgcccaacgagaaggtgctgcccaagcacagcctgctgtacgagtacttcaccgtgtataacgagctgaccaaagtgaaatacgtgaccgagggaatgagaaagcccgccttcctgagcggcgagcagaaaaaggccatcgtggacctgctgttcaagaccaaccggaaagtgaccgtgaagcagctgaaagaggactacttcaagaaaatcgagtgcttcgactccgtggaaatctccggcgtggaagatcggttcaacgcctccctgggcacataccacgatctgctgaaaattatcaaggacaaggacttcctggacaatgaggaaaacgaggacattctggaagatatcgtgctgaccctgacactgtttgaggacagagagatgatcgaggaacggctgaaaacctatgcccacctgttcgacgacaaagtgatgaagcagctgaagcggcggagatacaccggctggggcaggctgagccggaagctgatcaacggcatccgggacaagcagtccggcaagacaatcctggatttcctgaagtccgacggcttcgccaacagaaacttcatgcagctgatccacgacgacagcctgacctttaaagaggacatccagaaagcccaggtgtccggccagggcgatagcctgcacgagcacattgccaatctggccggcagccccgccattaagaagggcatcctgcagacagtgaaggtggtggacgagctcgtgaaagtgatgggccggcacaagcccgagaacatcgtgatcgaaatggccagagagaaccagaccacccagaagggacagaagaacagccgcgagagaatgaagcggatcgaagagggcatcaaagagctgggcagccagatcctgaaagaacaccccgtggaaaacacccagctgcagaacgagaagctgtacctgtactacctgcagaatgggcgggatatgtacgtggaccaggaactggacatcaaccggctgtccgactacgatgtggacgctatcgtgcctcagagctttctgaaggacgactccatcgacaacaaggtgctgaccagaagcgacaagaaccggggcaagagcgacaacgtgccctccgaagaggtcgtgaagaagatgaagaactactggcggcagctgctgaacgccaagctgattacccagagaaagttcgacaatctgaccaaggccgagagaggcggcctgagcgaactggataaggccggcttcatcaagagacagctggtggaaacccggcagatcacaaagcacgtggcacagatcctggactcccggatgaacactaagtacgacgagaatgacaagctgatccgggaagtgaaagtgatcaccctgaagtccaagctggtgtccgatttccggaaggatttccagttttacaaagtgcgcgagatcaacaactaccaccacgcccacgacgcctacctgaacgccgtcgtgggaaccgccctgatcaaaaagtaccctaagctggaaagcgagttcgtgtacggcgactacaaggtgtacgacgtgcggaagatgatcgccaagagcgagcaggaaatcggcaaggctaccgccaagtacttcttctacagcaacatcatgaactttttcaagaccgagattaccctggccaacggcgagatccggaagcggcctctgatcgagacaaacggcgaaaccggggagatcgtgtgggataagggccgggattttgccaccgtgcggaaagtgctgagcatgccccaagtgaatatcgtgaaaaagaccgaggtgcagacaggcggcttcagcaaagagtctatcctgcccaagaggaacagcgataagctgatcgccagaaagaaggactgggaccctaagaagtacggcggcttcgacagccccaccgtggcctattctgtgctggtggtggccaaagtggaaaagggcaagtccaagaaactgaagagtgtgaaagagctgctggggatcaccatcatggaaagaagcagcttcgagaagaatcccatcgactttctggaagccaagggctacaaagaagtgaaaaaggacctgatcatcaagctgcctaagtactccctgttcgagctggaaaacggccggaagagaatgctggcctctgccggcgaactgcagaagggaaacgaactggccctgccctccaaatatgtgaacttcctgtacctggccagccactatgagaagctgaagggctcccccgaggataatgagcagaaacagctgtttgtggaacagcacaagcactacctggacgagatcatcgagcagatcagcgagttctccaagagagtgatcctggccgacgctaatctggacaaagtgctgtccgcctacaacaagcaccgggataagcccatcagagagcaggccgagaatatcatccacctgtttaccctgaccaatctgggagcccctgccgccttcaagtactttgacaccaccatcgaccggaagaggtacaccagcaccaaagaggtgctggacgccaccctgatccaccagagcatcaccggcctgtacgagacacggatcgacctgtctcagctgggaggtgactccggcggctcctccggcggaagcagcggcggcagcagcggcggaagcagcggcggcagcagcggcggaagctctggcggatctagcggcggctctaccctgaacatcgaggacgagtacaggctgcacgagaccagcaaggagcccgacgtgagcctgggcagcacctggctgagcgatttccctcaggcttgggccgagaccggcggcatgggcctggccgtgcggcaggcccccctgattatccccctgaaggccaccagcacccccgtgagcatcaagcagtacccaatgtcccaggaggccaggctgggcatcaagcctcacatccagaggctgctggaccagggcatcctggtgccatgccagtccccctggaacacccctctgctgcccgtgaagaagcctggcaccaacgactaccggcccgtgcaggacctgagagaagtgaacaagcgggtggaggacatccacccaaccgtgcccaacccttacaacctgctgtccggcctgccccccagccaccagtggtacaccgtgctggacctgaaggacgccttcttctgcctgagactgcaccccacctctcagcccctgttcgccttcgagtggcgcgaccccgagatgggcatcagcggccagctgacctggaccagactgccacagggctttaagaatagcccaaccctgtttaacgaggccctgcacagggacctggccgacttcaggatccagcaccccgacctgattctgctgcagtacgtggacgacctgctgctggccgctaccagcgagctggactgccagcagggcaccagagccctgctgcagaccctgggcaacctgggctacagagccagcgccaagaaggcccagatctgtcagaagcaggtgaagtatctgggctacctgctgaaggaaggccagagatggctgaccgaggccagaaaggagactgtgatgggccagcccacccccaagacccccaggcagctgcgggagttcctgggcaaggccggcttttgcagactgtttatccctggcttcgccgagatggccgccccactgtaccctctgaccaagcctggcaccctgtttaactggggccccgaccagcagaaggcctaccaggagatcaagcaggccctgctgaccgcccccgccctgggcctgcccgacctgaccaagcctttcgagctgttcgtggacgagaagcagggatacgccaaaggcgtgctgacccagaagctgggcccctggcggaggcccgtggcctacctgagcaaaaaactggaccctgtggccgccggctggcccccatgcctgcggatggtggccgccatcgctgtgctgaccaaggacgccggcaagctgaccatgggccagcccctggtgatcctggcccctcacgccgtggaggctctggtgaagcagcctccagacaggtggctgtccaacgccaggatgacccactaccaggccctgctgctggacaccgaccgggtgcagttcggccctgtggtggccctgaaccccgccaccctgctgcctctgccagaggagggcctgcagcacaactgcctggacatcctggccgaggcccacggcaccaggcccgacctgaccgaccagcccctgcctgacgccgaccacacctggtacaccgacggcagctccctgctgcaggagggccagaggaaggccggcgccgccgtgaccaccgagaccgaggtgatctgggccaaagccctgcctgccggcacctccgcccagcgggccgagctgatcgccctgacccaggccctgaagatggctgagggcaagaagctgaacgtgtacaccgattccagatacgccttcgccaccgcccacatccacggcgagatctacagaagaaggggctggctgacctccgagggcaaggagatcaagaacaaggacgagattctggccctgctgaaggccctgttcctgcctaagagactgagcatcatccactgtcccggccaccagaagggccacagcgccgaggccagaggcaatagaatggccgaccaggccgccagaaaggccgccatcaccgagacccccgacaccagcaccctgctgatcgagaacagcagccccagcggcggctccaaacgcaccgccgacgggagcgagttcgagcccaagaagaagaggaaagtctaatagtga

SEQ ID NO: 279 - RNA, 6357 nt, synthetic construct
  misc_feature 1..6357: note = Description of Artificial Sequence: Synthetic polynucleotide
  source 1..6357: mol_type = other RNA
atgaaacggacagccgacggaagcgagttcgagtcaccaaagaagaagcggaaagtcgacaagaagtacagcatcggcctggacatcggcaccaactctgtgggctgggccgtgatcaccgacgagtacaaggtgcccagcaagaaattcaaggtgctgggcaacaccgaccggcacagcatcaagaagaacctgatcggagccctgctgttcgacagcggcgaaacagccgaggccacccggctgaagagaaccgccagaagaagatacaccagacggaagaaccggatctgctatctgcaagagatcttcagcaacgagatggccaaggtggacgacagcttcttccacagactggaagagtccttcctggtggaagaggataagaagcacgagcggcaccccatcttcggcaacatcgtggacgaggtggcctaccacgagaagtaccccaccatctaccacctgagaaagaaactggtggacagcaccgacaaggccgacctgcggctgatctatctggccctggcccacatgatcaagttccggggccacttcctgatcgagggcgacctgaaccccgacaacagcgacgtggacaagctgttcatccagctggtgcagacctacaaccagctgttcgaggaaaaccccatcaacgccagcggcgtggacgccaaggccatcctgtctgccagactgagcaagagcagacggctggaaaatctgatcgcccagctgcccggcgagaagaagaatggcctgttcggaaacctgattgccctgagcctgggcctgacccccaacttcaagagcaacttcgacctggccgaggatgccaaactgcagctgagcaaggacacctacgacgacgacctggacaacctgctggcccagatcggcgaccagtacgccgacctgtttctggccgccaagaacctgtccgacgccatcctgctgagcgacatcctgagagtgaacaccgagatcaccaaggcccccctgagcgcctctatgatcaagagatacgacgagcaccaccaggacctgaccctgctgaaagctctcgtgcggcagcagctgcctgagaagtacaaagagattttcttcgaccagagcaagaacggctacgccggctacattgacggcggagccagccaggaagagttctacaagttcatcaagcccatcctggaaaagatggacggcaccgaggaactgctcgtgaagctgaacagagaggacctgctgcggaagcagcggaccttcgacaacggcagcatcccccaccagatccacctgggagagctgcacgccattctgcggcggcaggaagatttttacccattcctgaaggacaaccgggaaaagatcgagaagatcctgaccttccgcatcccctactacgtgggccctctggccaggggaaacagcagattcgcctggatgaccagaaagagcgaggaaaccatcaccccctggaacttcgaggaagtggtggacaagggcgcttccgcccagagcttcatcgagcggatgaccaacttcgataagaacctgcccaacgagaaggtgctgcccaagcacagcctgctgtacgagtacttcaccgtgtataacgagctgaccaaagtgaaatacgtgaccgagggaatgagaaagcccgccttcctgagcggcgagcagaaaaaggccatcgtggacctgctgttcaagaccaaccggaaagtgaccgtgaagcagctgaaagaggactacttcaagaaaatcgagtgcttcgactccgtggaaatctccggcgtggaagatcggttcaacgcctccctgggcacataccacgatctgctgaaaattatcaaggacaaggacttcctggacaatgaggaaaacgaggacattctggaagatatcgtgctgaccctgacactgtttgaggacagagagatgatcgaggaacggctgaaaacctatgcccacctgttcgacgacaaagtgatgaagcagctgaagcggcggagatacaccggctggggcaggctgagccggaagctgatcaacggcatccgggacaagcagtccggcaagacaatcctggatttcctgaagtccgacggcttcgccaacagaaacttcatgcagctgatccacgacgacagcctgacctttaaagaggacatccagaaagcccaggtgtccggccagggcgatagcctgcacgagcacattgccaatctggccggcagccccgccattaagaagggcatcctgcagacagtgaaggtggtggacgagctcgtgaaagtgatgggccggcacaagcccgagaacatcgtgatcgaaatggccagagagaaccagaccacccagaagggacagaagaacagccgcgagagaatgaagcggatcgaagagggcatcaaagagctgggcagccagatcctgaaagaacaccccgtggaaaacacccagctgcagaacgagaagctgtacctgtactacctgcagaatgggcgggatatgtacgtggaccaggaactggacatcaaccggctgtccgactacgatgtggacgctatcgtgcctcagagctttctgaaggacgactccatcgacaacaaggtgctgaccagaagcgacaagaaccggggcaagagcgacaacgtgccctccgaagaggtcgtgaagaagatgaagaactactggcggcagctgctgaacgccaagctgattacccagagaaagttcgacaatctgaccaaggccgagagaggcggcctgagcgaactggataaggccggcttcatcaagagacagctggtggaaacccggcagatcacaaagcacgtggcacagatcctggactcccggatgaacactaagtacgacgagaatgacaagctgatccgggaagtgaaagtgatcaccctgaagtccaagctggtgtccgatttccggaaggatttccagttttacaaagtgcgcgagatcaacaactaccaccacgcccacgacgcctacctgaacgccgtcgtgggaaccgccctgatcaaaaagtaccctaagctggaaagcgagttcgtgtacggcgactacaaggtgtacgacgtgcggaagatgatcgccaagagcgagcaggaaatcggcaaggctaccgccaagtacttcttctacagcaacatcatgaactttttcaagaccgagattaccctggccaacggcgagatccggaagcggcctctgatcgagacaaacggcgaaaccggggagatcgtgtgggataagggccgggattttgccaccgtgcggaaagtgctgagcatgccccaagtgaatatcgtgaaaaagaccgaggtgcagacaggcggcttcagcaaagagtctatcctgcccaagaggaacagcgataagctgatcgccagaaagaaggactgggaccctaagaagtacggcggcttcgacagccccaccgtggcctattctgtgctggtggtggccaaagtggaaaagggcaagtccaagaaactgaagagtgtgaaagagctgctggggatcaccatcatggaaagaagcagcttcgagaagaatcccatcgactttctggaagccaagggctacaaagaagtgaaaaaggacctgatcatcaagctgcctaagtactccctgttcgagctggaaaacggccggaagagaatgctggcctctgccggcgaactgcagaagggaaacgaactggccctgccctccaaatatgtgaacttcctgtacctggccagccactatgagaagctgaagggctcccccgaggataatgagcagaaacagctgtttgtggaacagcacaagcactacctggacgagatcatcgagcagatcagcgagttctccaagagagtgatcctggccgacgctaatctggacaaagtgctgtccgcctacaacaagcaccgggataagcccatcagagagcaggccgagaatatcatccacctgtttaccctgaccaatctgggagcccctgccgccttcaagtactttgacaccaccatcgaccggaagaggtacaccagcaccaaagaggtgctggacgccaccctgatccaccagagcatcaccggcctgtacgagacacggatcgacctgtctcagctgggaggtgactccggcggctcctccggcggaagcagcggcggcagcagcggcggaagcagcggcggcagcagcggcggaagctctggcggatctagcggcggctctaccctgaacatcgaggacgagtacaggctgcacgagaccagcaaggagcccgacgtgagcctgggcagcacctggctgagcgatttccctcaggcttgggccgagaccggcggcatgggcctggccgtgcggcaggcccccctgattatccccctgaaggccaccagcacccccgtgagcatcaagcagtacccaatgtcccaggaggccaggctgggcatcaagcctcacatccagaggctgctggaccagggcatcctggtgccatgccagtccccctggaacacccctctgctgcccgtgaagaagcctggcaccaacgactaccggcccgtgcaggacctgagagaagtgaacaagcgggtggaggacatccacccaaccgtgcccaacccttacaacctgctgtccggcctgccccccagccaccagtggtacaccgtgctggacctgaaggacgccttcttctgcctgagactgcaccccacctctcagcccctgttcgccttcgagtggcgcgaccccgagatgggcatcagcggccagctgacctggaccagactgccacagggctttaagaatagcccaaccctgtttaacgaggccctgcacagggacctggccgacttcaggatccagcaccccgacctgattctgctgcagtacgtggacgacctgctgctggccgctaccagcgagctggactgccagcagggcaccagagccctgctgcagaccctgggcaacctgggctacagagccagcgccaagaaggcccagatctgtcagaagcaggtgaagtatctgggctacctgctgaaggaaggccagagatggctgaccgaggccagaaaggagactgtgatgggccagcccacccccaagacccccaggcagctgcgggagttcctgggcaaggccggcttttgcagactgtttatccctggcttcgccgagatggccgccccactgtaccctctgaccaagcctggcaccctgtttaactggggccccgaccagcagaaggcctaccaggagatcaagcaggccctgctgaccgcccccgccctgggcctgcccgacctgaccaagcctttcgagctgttcgtggacgagaagcagggatacgccaaaggcgtgctgacccagaagctgggcccctggcggaggcccgtggcctacctgagcaaaaaactggaccctgtggccgccggctggcccccatgcctgcggatggtggccgccatcgctgtgctgaccaaggacgccggcaagctgaccatgggccagcccctggtgatcctggcccctcacgccgtggaggctctggtgaagcagcctccagacaggtggctgtccaacgccaggatgacccactaccaggccctgctgctggacaccgaccgggtgcagttcggccctgtggtggccctgaaccccgccaccctgctgcctctgccagaggagggcctgcagcacaactgcctggacatcctggccgaggcccacggcaccaggcccgacctgaccgaccagcccctgcctgacgccgaccacacctggtacaccgacggcagctccctgctgcaggagggccagaggaaggccggcgccgccgtgaccaccgagaccgaggtgatctgggccaaagccctgcctgccggcacctccgcccagcgggccgagctgatcgccctgacccaggccctgaagatggctgagggcaagaagctgaacgtgtacaccgattccagatacgccttcgccaccgcccacatccacggcgagatctacagaagaaggggctggctgacctccgagggcaaggagatcaagaacaaggacgagattctggccctgctgaaggccctgttcctgcctaagagactgagcatcatccactgtcccggccaccagaagggccacagcgccgaggccagaggcaatagaatggccgaccaggccgccagaaaggccgccatcaccgagacccccgacaccagcaccctgctgatcgagaacagcagccccagcggcggctccaaacgcaccgccgacgggagcgagttcgagcccaagaagaagaggaaagtctaatagtga

SEQ ID NO: 280 - DNA, 5988 bp, synthetic construct
  misc_feature 1..5988: note = Description of Artificial Sequence: Synthetic polynucleotide
  source 1..5988: mol_type = other DNA
aggaaataagagagaaaagaagagtaagaagaaatataagagccaccatgaaacggacagccgacggaagcgagttcgagtcaccaaagaagaagcggaaagtcgacaagaagtacagcatcggcctggacatcggcaccaactctgtgggctgggccgtgatcaccgacgagtacaaggtgcccagcaagaaattcaaggtgctgggcaacaccgaccggcacagcatcaagaagaacctgatcggagccctgctgttcgacagcggcgaaacagccgaggccacccggctgaagagaaccgccagaagaagatacaccagacggaagaaccggatctgctatctgcaagagatcttcagcaacgagatggccaaggtggacgacagcttcttccacagactggaagagtccttcctggtggaagaggataagaagcacgagcggcaccccatcttcggcaacatcgtggacgaggtggcctaccacgagaagtaccccaccatctaccacctgagaaagaaactggtggacagcaccgacaaggccgacctgcggctgatctatctggccctggcccacatgatcaagttccggggccacttcctgatcgagggcgacctgaaccccgacaacagcgacgtggacaagctgttcatccagctggtgcagacctacaaccagctgttcgaggaaaaccccatcaacgccagcggcgtggacgccaaggccatcctgtctgccagactgagcaagagcagacggctggaaaatctgatcgcccagctgcccggcgagaagaagaatggcctgttcggaaacctgattgccctgagcctgggcctgacccccaacttcaagagcaacttcgacctggccgaggatgccaaactgcagctgagcaaggacacctacgacgacgacctggacaacctgctggcccagatcggcgaccagtacgccgacctgtttctggccgccaagaacctgtccgacgccatcctgctgagcgacatcctgagagtgaacaccgagatcaccaaggcccccctgagcgcctctatgatcaagagatacgacgagcaccaccaggacctgaccctgctgaaagctctcgtgcggcagcagctgcctgagaagtacaaagagattttcttcgaccagagcaagaacggctacgccggctacattgacggcggagccagccaggaagagttctacaagttcatcaagcccatcctggaaaagatggacggcaccgaggaactgctcgtgaagctgaacagagaggacctgctgcggaagcagcggaccttcgacaacggcagcatcccccaccagatccacctgggagagctgcacgccattctgcggcggcaggaagatttttacccattcctgaaggacaaccgggaaaagatcgagaagatcctgaccttccgcatcccctactacgtgggccctctggccaggggaaacagcagattcgcctggatgaccagaaagagcgaggaaaccatcaccccctggaacttcgaggaagtggtggacaagggcgcttccgcccagagcttcatcgagcggatgaccaacttcgataagaacctgcccaacgagaaggtgctgcccaagcacagcctgctgtacgagtacttcaccgtgtataacgagctgaccaaagtgaaatacgtgaccgagggaatgagaaagcccgccttcctgagcggcgagcagaaaaaggccatcgtggacctgctgttcaagaccaaccggaaagtgaccgtgaagcagctgaaagaggactacttcaagaaaatcgagtgcttcgactccgtggaaatctccggcgtggaagatcggttcaacgcctccctgggcacataccacgatctgctgaaaattatcaaggacaaggacttcctggacaatgaggaaaacgaggacattctggaagatatcgtgctgaccctgacactgtttgaggacagagagatgatcgaggaacggctgaaaacctatgcccacctgttcgacgacaaagtgatgaagcagctgaagcggcggagatacaccggctggggcaggctgagccggaagctgatcaacggcatccgggacaagcagtccggcaagacaatcctggatttcctgaagtccgacggcttcgccaacagaaacttcatgcagctgatccacgacgacagcctgacctttaaagaggacatccagaaagcccaggtgtccggccagggcgatagcctgcacgagcacattgccaatctggccggcagccccgccattaagaagggcatcctgcagacagtgaaggtggtggacgagctcgtgaaagtgatgggccggcacaagcccgagaacatcgtgatcgaaatggccagagagaaccagaccacccagaagggacagaagaacagccgcgagagaatgaagcggatcgaagagggcatcaaagagctgggcagccagatcctgaaagaacaccccgtggaaaacacccagctgcagaacgagaagctgtacctgtactacctgcagaatgggcgggatatgtacgtggaccaggaactggacatcaaccggctgtccgactacgatgtggacgctatcgtgcctcagagctttctgaaggacgactccatcgacaacaaggtgctgaccagaagcgacaagaaccggggcaagagcgacaacgtgccctccgaagaggtcgtgaagaagatgaagaactactggcggcagctgctgaacgccaagctgattacccagagaaagttcgacaatctgaccaaggccgagagaggcggcctgagcgaactggataaggccggcttcatcaagagacagctggtggaaacccggcagatcacaaagcacgtggcacagatcctggactcccggatgaacactaagtacgacgagaatgacaagctgatccgggaagtgaaagtgatcaccctgaagtccaagctggtgtccgatttccggaaggatttccagttttacaaagtgcgcgagatcaacaactaccaccacgcccacgacgcctacctgaacgccgtcgtgggaaccgccctgatcaaaaagtaccctaagctggaaagcgagttcgtgtacggcgactacaaggtgtacgacgtgcggaagatgatcgccaagagcgagcaggaaatcggcaaggctaccgccaagtacttcttctacagcaacatcatgaactttttcaagaccgagattaccctggccaacggcgagatccggaagcggcctctgatcgagacaaacggcgaaaccggggagatcgtgtgggataagggccgggattttgccaccgtgcggaaagtgctgagcatgccccaagtgaatatcgtgaaaaagaccgaggtgcagacaggcggcttcagcaaagagtctatcctgcccaagaggaacagcgataagctgatcgccagaaagaaggactgggaccctaagaagtacggcggcttcgacagccccaccgtggcctattctgtgctggtggtggccaaagtggaaaagggcaagtccaagaaactgaagagtgtgaaagagctgctggggatcaccatcatggaaagaagcagcttcgagaagaatcccatcgactttctggaagccaagggctacaaagaagtgaaaaaggacctgatcatcaagctgcctaagtactccctgttcgagctggaaaacggccggaagagaatgctggcctctgccggcgaactgcagaagggaaacgaactggccctgccctccaaatatgtgaacttcctgtacctggccagccactatgagaagctgaagggctcccccgaggataatgagcagaaacagctgtttgtggaacagcacaagcactacctggacgagatcatcgagcagatcagcgagttctccaagagagtgatcctggccgacgctaatctggacaaagtgctgtccgcctacaacaagcaccgggataagcccatcagagagcaggccgagaatatcatccacctgtttaccctgaccaatctgggagcccctgccgccttcaagtactttgacaccaccatcgaccggaagaggtacactagcaccaaagaggtgctggacgccaccctgatccaccagagcatcaccggcctgtacgagacacggatcgacctgtctcagctgggaggtgactccggcggctcctccggcggaagcagcggcggcagcagcggcggaagcagcggcggcagcagcggcggaagctctggcggatctagcggcggctctaccctgaacatcgaggacgagtacaggctgcacgagaccagcaaggagcccgacgtgagcctgggcagcacctggctgagcgatttccctcaggcttgggccgagaccggcggcatgggcctggccgtgcggcaggcccccctgattatccccctgaaggccaccagcacccccgtgagcatcaagcagtacccaatgtcccaggaggccaggctgggcatcaagcctcacatccagaggctgctggaccagggcatcctggtgccatgccagtccccctggaacacccctctgctgcccgtgaagaagcctggcaccaacgactaccggcccgtgcaggacctgagagaagtgaacaagcgggtggaggacatccacccaaccgtgcccaacccttacaacctgctgtccggcctgccccccagccaccagtggtacaccgtgctggacctgaaggacgccttcttctgcctgagactgcaccccacctctcagcccctgttcgccttcgagtggcgcgaccccgagatgggcatcagcggccagctgacctggaccagactgccacagggctttaagaatagcccaaccctgtttaacgaggccctgcacagggacctggccgacttcaggatccagcaccccgacctgattctgctgcagtacgtggacgacctgctgctggccgctaccagcgagctggactgccagcagggcaccagagccctgctgcagaccctgggcaacctgggctacagagccagcgccaagaaggcccagatctgtcagaagcaggtgaagtatctgggctacctgctgaaggaaggccagagatggctgaccgaggccagaaaggagactgtgatgggccagcccacccccaagacccccaggcagctgcgggagttcctgggcaaggccggcttttgcagactgtttatccctggcttcgccgagatggccgccccactgtaccctctgaccaagcctggcaccctgtttaactggggccccgaccagcagaaggcctaccaggagatcaagcaggccctgctgaccgcccccgccctgggcctgcccgacctgaccaagcctttcgagctgttcgtggacgagaagcagggatacgccaaaggcgtgctgacccagaagctgggcccctggcggaggcccgtggcctacctgagcaaaaaactggaccctgtggccgccggctggcccccatgcctgcggatggtggccgccatcgctgtgctgaccaaggacgccggcaagctgaccatgggccagcccctggtgatcctggcccctcacgccgtggaggctctggtgaagcagcctccagacaggtggctgtccaacgccaggatgacccactaccaggccctgctgctggacaccgaccgggtgcagttcggccctgtggtggccctgaaccccgccaccctgctgcctctgccagaggagggcctgcagcacaactgcctggacatcctggccgaggcccacggcagcggcggctccaaacgcaccgccgacgggagcgagttcgagcccaagaagaagaggaaagtctaagcggccgcttaattaagctgccttctgcggggcttgccttctggccaagcccttcttctctcccttgcacctgtacctcttggtctttgaataaagcctgagtaggaag

SEQ ID NO: 281 - DNA, 5994 bp, synthetic construct
  misc_feature 1..5994: note = Description of Artificial Sequence: Synthetic polynucleotide
  source 1..5994: mol_type = other DNA
aggaaataagagagaaaagaagagtaagaagaaatataagagccaccatgaaacggacagccgacggaagcgagttcgagtcaccaaagaagaagcggaaagtcgacaagaagtacagcatcggcctggacatcggcaccaactctgtgggctgggccgtgatcaccgacgagtacaaggtgcccagcaagaaattcaaggtgctgggcaacaccgaccggcacagcatcaagaagaacctgatcggagccctgctgttcgacagcggcgaaacagccgaggccacccggctgaagagaaccgccagaagaagatacaccagacggaagaaccggatctgctatctgcaagagatcttcagcaacgagatggccaaggtggacgacagcttcttccacagactggaagagtccttcctggtggaagaggataagaagcacgagcggcaccccatcttcggcaacatcgtggacgaggtggcctaccacgagaagtaccccaccatctaccacctgagaaagaaactggtggacagcaccgacaaggccgacctgcggctgatctatctggccctggcccacatgatcaagttccggggccacttcctgatcgagggcgacctgaaccccgacaacagcgacgtggacaagctgttcatccagctggtgcagacctacaaccagctgttcgaggaaaaccccatcaacgccagcggcgtggacgccaaggccatcctgtctgccagactgagcaagagcagacggctggaaaatctgatcgcccagctgcccggcgagaagaagaatggcctgttcggaaacctgattgccctgagcctgggcctgacccccaacttcaagagcaacttcgacctggccgaggatgccaaactgcagctgagcaaggacacctacgacgacgacctggacaacctgctggcccagatcggcgaccagtacgccgacctgtttctggccgccaagaacctgtccgacgccatcctgctgagcgacatcctgagagtgaacaccgagatcaccaaggcccccctgagcgcctctatgatcaagagatacgacgagcaccaccaggacctgaccctgctgaaagctctcgtgcggcagcagctgcctgagaagtacaaagagattttcttcgaccagagcaagaacggctacgccggctacattgacggcggagccagccaggaagagttctacaagttcatcaagcccatcctggaaaagatggacggcaccgaggaactgctcgtgaagctgaacagagaggacctgctgcggaagcagcggaccttcgacaacggcagcatcccccaccagatccacctgggagagctgcacgccattctgcggcggcaggaagatttttacccattcctgaaggacaaccgggaaaagatcgagaagatcctgaccttccgcatcccctactacgtgggccctctggccaggggaaacagcagattcgcctggatgaccagaaagagcgaggaaaccatcaccccctggaacttcgaggaagtggtggacaagggcgcttccgcccagagcttcatcgagcggatgaccaacttcgataagaacctgcccaacgagaaggtgctgcccaagcacagcctgctgtacgagtacttcaccgtgtataacgagctgaccaaagtgaaatacgtgaccgagggaatgagaaagcccgccttcctgagcggcgagcagaaaaaggccatcgtggacctgctgttcaagaccaaccggaaagtgaccgtgaagcagctgaaagaggactacttcaagaaaatcgagtgcttcgactccgtggaaatctccggcgtggaagatcggttcaacgcctccctgggcacataccacgatctgctgaaaattatcaaggacaaggacttcctggacaatgaggaaaacgaggacattctggaagatatcgtgctgaccctgacactgtttgaggacagagagatgatcgaggaacggctgaaaacctatgcccacctgttcgacgacaaagtgatgaagcagctgaagcggcggagatacaccggctggggcaggctgagccggaagctgatcaacggcatccgggacaagcagtccggcaagacaatcctggatttcctgaagtccgacggcttcgccaacagaaacttcatgcagctgatccacgacgacagcctgacctttaaagaggacatccagaaagcccaggtgtccggccagggcgatagcctgcacgagcacattgccaatctggccggcagccccgccattaagaagggcatcctgcagacagtgaaggtggtggacgagctcgtgaaagtgatgggccggcacaagcccgagaacatcgtgatcgaaatggccagagagaaccagaccacccagaagggacagaagaacagccgcgagagaatgaagcggatcgaagagggcatcaaagagctgggcagccagatcctgaaagaacaccccgtggaaaacacccagctgcagaacgagaagctgtacctgtactacctgcagaatgggcgggatatgtacgtggaccaggaactggacatcaaccggctgtccgactacgatgtggacgctatcgtgcctcagagctttctgaaggacgactccatcgacaacaaggtgctgaccagaagcgacaagaaccggggcaagagcgacaacgtgccctccgaagaggtcgtgaagaagatgaagaactactggcggcagctgctgaacgccaagctgattacccagagaaagttcgacaatctgaccaaggccgagagaggcggcctgagcgaactggataaggccggcttcatcaagagacagctggtggaaacccggcagatcacaaagcacgtggcacagatcctggactcccggatgaacactaagtacgacgagaatgacaagctgatccgggaagtgaaagtgatcaccctgaagtccaagctggtgtccgatttccggaaggatttccagttttacaaagtgcgcgagatcaacaactaccaccacgcccacgacgcctacctgaacgccgtcgtgggaaccgccctgatcaaaaagtaccctaagctggaaagcgagttcgtgtacggcgactacaaggtgtacgacgtgcggaagatgatcgccaagagcgagcaggaaatcggcaaggctaccgccaagtacttcttctacagcaacatcatgaactttttcaagaccgagattaccctggccaacggcgagatccggaagcggcctctgatcgagacaaacggcgaaaccggggagatcgtgtgggataagggccgggattttgccaccgtgcggaaagtgctgagcatgccccaagtgaatatcgtgaaaaagaccgaggtgcagacaggcggcttcagcaaagagtctatcctgcccaagaggaacagcgataagctgatcgccagaaagaaggactgggaccctaagaagtacggcggcttcgacagccccaccgtggcctattctgtgctggtggtggccaaagtggaaaagggcaagtccaagaaactgaagagtgtgaaagagctgctggggatcaccatcatggaaagaagcagcttcgagaagaatcccatcgactttctggaagccaagggctacaaagaagtgaaaaaggacctgatcatcaagctgcctaagtactccctgttcgagctggaaaacggccggaagagaatgctggcctctgccggcgaactgcagaagggaaacgaactggccctgccctccaaatatgtgaacttcctgtacctggccagccactatgagaagctgaagggctcccccgaggataatgagcagaaacagctgtttgtggaacagcacaagcactacctggacgagatcatcgagcagatcagcgagttctccaagagagtgatcctggccgacgctaatctggacaaagtgctgtccgcctacaacaagcaccgggataagcccatcagagagcaggccgagaatatcatccacctgtttaccctgaccaatctgggagcccctgccgccttcaagtactttgacaccaccatcgaccggaagaggtacactagcaccaaagaggtgctggacgccaccctgatccaccagagcatcaccggcctgtacgagacacggatcgacctgtctcagctgggaggtgactccggcggctcctccggcggaagcagcggcggcagcagcggcggaagcagcggcggcagcagcggcggaagctctggcggatctagcggcggctctaccctgaacatcgaggacgagtacaggctgcacgagaccagcaaggagcccgacgtgagcctgggcagcacctggctgagcgatttccctcaggcttgggccgagaccggcggcatgggcctggccgtgcggcaggcccccctgattatccccctgaaggccaccagcacccccgtgagcatcaagcagtacccaatgtcccaggaggccaggctgggcatcaagcctcacatccagaggctgctggaccagggcatcctggtgccatgccagtccccctggaacacccctctgctgcccgtgaagaagcctggcaccaacgactaccggcccgtgcaggacctgagagaagtgaacaagcgggtggaggacatccacccaaccgtgcccaacccttacaacctgctgtccggcctgccccccagccaccagtggtacaccgtgctggacctgaaggacgccttcttctgcctgagactgcaccccacctctcagcccctgttcgccttcgagtggcgcgaccccgagatgggcatcagcggccagctgacctggaccagactgccacagggctttaagaatagcccaaccctgtttaacgaggccctgcacagggacctggccgacttcaggatccagcaccccgacctgattctgctgcagtacgtggacgacctgctgctggccgctaccagcgagctggactgccagcagggcaccagagccctgctgcagaccctgggcaacctgggctacagagccagcgccaagaaggcccagatctgtcagaagcaggtgaagtatctgggctacctgctgaaggaaggccagagatggctgaccgaggccagaaaggagactgtgatgggccagcccacccccaagacccccaggcagctgcgggagttcctgggcaaggccggcttttgcagactgtttatccctggcttcgccgagatggccgccccactgtaccctctgaccaagcctggcaccctgtttaactggggccccgaccagcagaaggcctaccaggagatcaagcaggccctgctgaccgcccccgccctgggcctgcccgacctgaccaagcctttcgagctgttcgtggacgagaagcagggatacgccaaaggcgtgctgacccagaagctgggcccctggcggaggcccgtggcctacctgagcaaaaaactggaccctgtggccgccggctggcccccatgcctgcggatggtggccgccatcgctgtgctgaccaaggacgccggcaagctgaccatgggccagcccctggtgatcctggcccctcacgccgtggaggctctggtgaagcagcctccagacaggtggctgtccaacgccaggatgacccactaccaggccctgctgctggacaccgaccgggtgcagttcggccctgtggtggccctgaaccccgccaccctgctgcctctgccagaggagggcctgcagcacaactgcctggacatcctggccgaggcccacggcagcggcggctccaaacgcaccgccgacgggagcgagttcgagcccaagaagaagaggaaagtctaatagtgagcggccgcttaattaagctgccttctgcggggcttgccttctggccaagcccttcttctctcccttgcacctgtacctcttggtctttgaataaagcctgagtaggaag

SEQ ID NO: 282 - DNA, 5832 bp, synthetic construct
  misc_feature 1..5832: note = Description of Artificial Sequence: Synthetic polynucleotide
  source 1..5832: mol_type = other DNA
atgaaacggacagccgacggaagcgagttcgagtcaccaaagaagaagcggaaagtcgacaagaagtacagcatcggcctggacatcggcaccaactctgtgggctgggccgtgatcaccgacgagtacaaggtgcccagcaagaaattcaaggtgctgggcaacaccgaccggcacagcatcaagaagaacctgatcggagccctgctgttcgacagcggcgaaacagccgaggccacccggctgaagagaaccgccagaagaagatacaccagacggaagaaccggatctgctatctgcaagagatcttcagcaacgagatggccaaggtggacgacagcttcttccacagactggaagagtccttcctggtggaagaggataagaagcacgagcggcaccccatcttcggcaacatcgtggacgaggtggcctaccacgagaagtaccccaccatctaccacctgagaaagaaactggtggacagcaccgacaaggccgacctgcggctgatctatctggccctggcccacatgatcaagttccggggccacttcctgatcgagggcgacctgaaccccgacaacagcgacgtggacaagctgttcatccagctggtgcagacctacaaccagctgttcgaggaaaaccccatcaacgccagcggcgtggacgccaaggccatcctgtctgccagactgagcaagagcagacggctggaaaatctgatcgcccagctgcccggcgagaagaagaatggcctgttcggaaacctgattgccctgagcctgggcctgacccccaacttcaagagcaacttcgacctggccgaggatgccaaactgcagctgagcaaggacacctacgacgacgacctggacaacctgctggcccagatcggcgaccagtacgccgacctgtttctggccgccaagaacctgtccgacgccatcctgctgagcgacatcctgagagtgaacaccgagatcaccaaggcccccctgagcgcctctatgatcaagagatacgacgagcaccaccaggacctgaccctgctgaaagctctcgtgcggcagcagctgcctgagaagtacaaagagattttcttcgaccagagcaagaacggctacgccggctacattgacggcggagccagccaggaagagttctacaagttcatcaagcccatcctggaaaagatggacggcaccgaggaactgctcgtgaagctgaacagagaggacctgctgcggaagcagcggaccttcgacaacggcagcatcccccaccagatccacctgggagagctgcacgccattctgcggcggcaggaagatttttacccattcctgaaggacaaccgggaaaagatcgagaagatcctgaccttccgcatcccctactacgtgggccctctggccaggggaaacagcagattcgcctggatgaccagaaagagcgaggaaaccatcaccccctggaacttcgaggaagtggtggacaagggcgcttccgcccagagcttcatcgagcggatgaccaacttcgataagaacctgcccaacgagaaggtgctgcccaagcacagcctgctgtacgagtacttcaccgtgtataacgagctgaccaaagtgaaatacgtgaccgagggaatgagaaagcccgccttcctgagcggcgagcagaaaaaggccatcgtggacctgctgttcaagaccaaccggaaagtgaccgtgaagcagctgaaagaggactacttcaagaaaatcgagtgcttcgactccgtggaaatctccggcgtggaagatcggttcaacgcctccctgggcacataccacgatctgctgaaaattatcaaggacaaggacttcctggacaatgaggaaaacgaggacattctggaagatatcgtgctgaccctgacactgtttgaggacagagagatgatcgaggaacggctgaaaacctatgcccacctgttcgacgacaaagtgatgaagcagctgaagcggcggagatacaccggctggggcaggctgagccggaagctgatcaacggcatccgggacaagcagtccggcaagacaatcctggatttcctgaagtccgacggcttcgccaacagaaacttcatgcagctgatccacgacgacagcctgacctttaaagaggacatccagaaagcccaggtgtccggccagggcgatagcctgcacgagcacattgccaatctggccggcagccccgccattaagaagggcatcctgcagacagtgaaggtggtggacgagctcgtgaaagtgatgggccggcacaagcccgagaacatcgtgatcgaaatggccagagagaaccagaccacccagaagggacagaagaacagccgcgagagaatgaagcggatcgaagagggcatcaaagagctgggcagccagatcctgaaagaacaccccgtggaaaacacccagctgcagaacgagaagctgtacctgtactacctgcagaatgggcgggatatgtacgtggaccaggaactggacatcaaccggctgtccgactacgatgtggacgctatcgtgcctcagagctttctgaaggacgactccatcgacaacaaggtgctgaccagaagcgacaagaaccggggcaagagcgacaacgtgccctccgaagaggtcgtgaagaagatgaagaactactggcggcagctgctgaacgccaagctgattacccagagaaagttcgacaatctgaccaaggccgagagaggcggcctgagcgaactggataaggccggcttcatcaagagacagctggtggaaacccggcagatcacaaagcacgtggcacagatcctggactcccggatgaacactaagtacgacgagaatgacaagctgatccgggaagtgaaagtgatcaccctgaagtccaagctggtgtccgatttccggaaggatttccagttttacaaagtgcgcgagatcaacaactaccaccacgcccacgacgcctacctgaacgccgtcgtgggaaccgccctgatcaaaaagtaccctaagctggaaagcgagttcgtgtacggcgactacaaggtgtacgacgtgcggaagatgatcgccaagagcgagcaggaaatcggcaaggctaccgccaagtacttcttctacagcaacatcatgaactttttcaagaccgagattaccctggccaacggcgagatccggaagcggcctctgatcgagacaaacggcgaaaccggggagatcgtgtgggataagggccgggattttgccaccgtgcggaaagtgctgagcatgccccaagtgaatatcgtgaaaaagaccgaggtgcagacaggcggcttcagcaaagagtctatcctgcccaagaggaacagcgataagctgatcgccagaaagaaggactgggaccctaagaagtacggcggcttcgacagccccaccgtggcctattctgtgctggtggtggccaaagtggaaaagggcaagtccaagaaactgaagagtgtgaaagagctgctggggatcaccatcatggaaagaagcagcttcgagaagaatcccatcgactttctggaagccaagggctacaaagaagtgaaaaaggacctgatcatcaagctgcctaagtactccctgttcgagctggaaaacggccggaagagaatgctggcctctgccggcgaactgcagaagggaaacgaactggccctgccctccaaatatgtgaacttcctgtacctggccagccactatgagaagctgaagggctcccccgaggataatgagcagaaacagctgtttgtggaacagcacaagcactacctggacgagatcatcgagcagatcagcgagttctccaagagagtgatcctggccgacgctaatctggacaaagtgctgtccgcctacaacaagcaccgggataagcccatcagagagcaggccgagaatatcatccacctgtttaccctgaccaatctgggagcccctgccgccttcaagtactttgacaccaccatcgaccggaagaggtacactagcaccaaagaggtgctggacgccaccctgatccaccagagcatcaccggcctgtacgagacacggatcgacctgtctcagctgggaggtgactccggcggctcctccggcggaagcagcggcggcagcagcggcggaagcagcggcggcagcagcggcggaagctctggcggatctagcggcggctctaccctgaacatcgaggacgagtacaggctgcacgagaccagcaaggagcccgacgtgagcctgggcagcacctggctgagcgatttccctcaggcttgggccgagaccggcggcatgggcctggccgtgcggcaggcccccctgattatccccctgaaggccaccagcacccccgtgagcatcaagcagtacccaatgtcccaggaggccaggctgggcatcaagcctcacatccagaggctgctggaccagggcatcctggtgccatgccagtccccctggaacacccctctgctgcccgtgaagaagcctggcaccaacgactaccggcccgtgcaggacctgagagaagtgaacaagcgggtggaggacatccacccaaccgtgcccaacccttacaacctgctgtccggcctgccccccagccaccagtggtacaccgtgctggacctgaaggacgccttcttctgcctgagactgcaccccacctctcagcccctgttcgccttcgagtggcgcgaccccgagatgggcatcagcggccagctgacctggaccagactgccacagggctttaagaatagcccaaccctgtttaacgaggccctgcacagggacctggccgacttcaggatccagcaccccgacctgattctgctgcagtacgtggacgacctgctgctggccgctaccagcgagctggactgccagcagggcaccagagccctgctgcagaccctgggcaacctgggctacagagccagcgccaagaaggcccagatctgtcagaagcaggtgaagtatctgggctacctgctgaaggaaggccagagatggctgaccgaggccagaaaggagactgtgatgggccagcccacccccaagacccccaggcagctgcgggagttcctgggcaaggccggcttttgcagactgtttatccctggcttcgccgagatggccgccccactgtaccctctgaccaagcctggcaccctgtttaactggggccccgaccagcagaaggcctaccaggagatcaagcaggccctgctgaccgcccccgccctgggcctgcccgacctgaccaagcctttcgagctgttcgtggacgagaagcagggatacgccaaaggcgtgctgacccagaagctgggcccctggcggaggcccgtggcctacctgagcaaaaaactggaccctgtggccgccggctggcccccatgcctgcggatggtggccgccatcgctgtgctgaccaaggacgccggcaagctgaccatgggccagcccctggtgatcctggcccctcacgccgtggaggctctggtgaagcagcctccagacaggtggctgtccaacgccaggatgacccactaccaggccctgctgctggacaccgaccgggtgcagttcggccctgtggtggccctgaaccccgccaccctgctgcctctgccagaggagggcctgcagcacaactgcctggacatcctggccgaggcccacggcagcggcggctccaaacgcaccgccgacgggagcgagttcgagcccaagaagaagaggaaagtctaa

SEQ ID NO: 283 - RNA, 5832 nt, synthetic construct
  misc_feature 1..5832: note = Description of Artificial Sequence: Synthetic polynucleotide
  source 1..5832: mol_type = other RNA
atgaaacggacagccgacggaagcgagttcgagtcaccaaagaagaagcggaaagtcgacaagaagtacagcatcggcctggacatcggcaccaactctgtgggctgggccgtgatcaccgacgagtacaaggtgcccagcaagaaattcaaggtgctgggcaacaccgaccggcacagcatcaagaagaacctgatcggagccctgctgttcgacagcggcgaaacagccgaggccacccggctgaagagaaccgccagaagaagatacaccagacggaagaaccggatctgctatctgcaagagatcttcagcaacgagatggccaaggtggacgacagcttcttccacagactggaagagtccttcctggtggaagaggataagaagcacgagcggcaccccatcttcggcaacatcgtggacgaggtggcctaccacgagaagtaccccaccatctaccacctgagaaagaaactggtggacagcaccgacaaggccgacctgcggctgatctatctggccctggcccacatgatcaagttccggggccacttcctgatcgagggcgacctgaaccccgacaacagcgacgtggacaagctgttcatccagctggtgcagacctacaaccagctgttcgaggaaaaccccatcaacgccagcggcgtggacgccaaggccatcctgtctgccagactgagcaagagcagacggctggaaaatctgatcgcccagctgcccggcgagaagaagaatggcctgttcggaaacctgattgccctgagcctgggcctgacccccaacttcaagagcaacttcgacctggccgaggatgccaaactgcagctgagcaaggacacctacgacgacgacctggacaacctgctggcccagatcggcgaccagtacgccgacctgtttctggccgccaagaacctgtccgacgccatcctgctgagcgacatcctgagagtgaacaccgagatcaccaaggcccccctgagcgcctctatgatcaagagatacgacgagcaccaccaggacctgaccctgctgaaagctctcgtgcggcagcagctgcctgagaagtacaaagagattttcttcgaccagagcaagaacggctacgccggctacattgacggcggagccagccaggaagagttctacaagttcatcaagcccatcctggaaaagatggacggcaccgaggaactgctcgtgaagctgaacagagaggacctgctgcggaagcagcggaccttcgacaacggcagcatcccccaccagatccacctgggagagctgcacgccattctgcggcggcaggaagatttttacccattcctgaaggacaaccgggaaaagatcgagaagatcctgaccttccgcatcccctactacgtgggccctctggccaggggaaacagcagattcgcctggatgaccagaaagagcgaggaaaccatcaccccctggaacttcgaggaagtggtggacaagggcgcttccgcccagagcttcatcgagcggatgaccaacttcgataagaacctgcccaacgagaaggtgctgcccaagcacagcctgctgtacgagtacttcaccgtgtataacgagctgaccaaagtgaaatacgtgaccgagggaatgagaaagcccgccttcctgagcggcgagcagaaaaaggccatcgtggacctgctgttcaagaccaaccggaaagtgaccgtgaagcagctgaaagaggactacttcaagaaaatcgagtgcttcgactccgtggaaatctccggcgtggaagatcggttcaacgcctccctgggcacataccacgatctgctgaaaattatcaaggacaaggacttcctggacaatgaggaaaacgaggacattctggaagatatcgtgctgaccctgacactgtttgaggacagagagatgatcgaggaacggctgaaaacctatgcccacctgttcgacgacaaagtgatgaagcagctgaagcggcggagatacaccggctggggcaggctgagccggaagctgatcaacggcatccgggacaagcagtccggcaagacaatcctggatttcctgaagtccgacggcttcgccaacagaaacttcatgcagctgatccacgacgacagcctgacctttaaagaggacatccagaaagcccaggtgtccggccagggcgatagcctgcacgagcacattgccaatctggccggcagccccgccattaagaagggcatcctgcagacagtgaaggtggtggacgagctcgtgaaagtgatgggccggcacaagcccgagaacatcgtgatcgaaatggccagagagaaccagaccacccagaagggacagaagaacagccgcgagagaatgaagcggatcgaagagggcatcaaagagctgggcagccagatcctgaaagaacaccccgtggaaaacacccagctgcagaacgagaagctgtacctgtactacctgcagaatgggcgggatatgtacgtggaccaggaactggacatcaaccggctgtccgactacgatgtggacgctatcgtgcctcagagctttctgaaggacgactccatcgacaacaaggtgctgaccagaagcgacaagaaccggggcaagagcgacaacgtgccctccgaagaggtcgtgaagaagatgaagaactactggcggcagctgctgaacgccaagctgattacccagagaaagttcgacaatctgaccaaggccgagagaggcggcctgagcgaactggataaggccggcttcatcaagagacagctggtggaaacccggcagatcacaaagcacgtggcacagatcctggactcccggatgaacactaagtacgacgagaatgacaagctgatccgggaagtgaaagtgatcaccctgaagtccaagctggtgtccgatttccggaaggatttccagttttacaaagtgcgcgagatcaacaactaccaccacgcccacgacgcctacctgaacgccgtcgtgggaaccgccctgatcaaaaagtaccctaagctggaaagcgagttcgtgtacggcgactacaaggtgtacgacgtgcggaagatgatcgccaagagcgagcaggaaatcggcaaggctaccgccaagtacttcttctacagcaacatcatgaactttttcaagaccgagattaccctggccaacggcgagatccggaagcggcctctgatcgagacaaacggcgaaaccggggagatcgtgtgggataagggccgggattttgccaccgtgcggaaagtgctgagcatgccccaagtgaatatcgtgaaaaagaccgaggtgcagacaggcggcttcagcaaagagtctatcctgcccaagaggaacagcgataagctgatcgccagaaagaaggactgggaccctaagaagtacggcggcttcgacagccccaccgtggcctattctgtgctggtggtggccaaagtggaaaagggcaagtccaagaaactgaagagtgtgaaagagctgctggggatcaccatcatggaaagaagcagcttcgagaagaatcccatcgactttctggaagccaagggctacaaagaagtgaaaaaggacctgatcatcaagctgcctaagtactccctgttcgagctggaaaacggccggaagagaatgctggcctctgccggcgaactgcagaagggaaacgaactggccctgccctccaaatatgtgaacttcctgtacctggccagccactatgagaagctgaagggctcccccgaggataatgagcagaaacagctgtttgtggaacagcacaagcactacctggacgagatcatcgagcagatcagcgagttctccaagagagtgatcctggccgacgctaatctggacaaagtgctgtccgcctacaacaagcaccgggataagcccatcagagagcaggccgagaatatcatccacctgtttaccctgaccaatctgggagcccctgccgccttcaagtactttgacaccaccatcgaccggaagaggtacactagcaccaaagaggtgctggacgccaccctgatccaccagagcatcaccggcctgtacgagacacggatcgacctgtctcagctgggaggtgactccggcggctcctccggcggaagcagcggcggcagcagcggcggaagcagcggcggcagcagcggcggaagctctggcggatctagcggcggctctaccctgaacatcgaggacgagtacaggctgcacgagaccagcaaggagcccgacgtgagcctgggcagcacctggctgagcgatttccctcaggcttgggccgagaccggcggcatgggcctggccgtgcggcaggcccccctgattatccccctgaaggccaccagcacccccgtgagcatcaagcagtacccaatgtcccaggaggccaggctgggcatcaagcctcacatccagaggctgctggaccagggcatcctggtgccatgccagtccccctggaacacccctctgctgcccgtgaagaagcctggcaccaacgactaccggcccgtgcaggacctgagagaagtgaacaagcgggtggaggacatccacccaaccgtgcccaacccttacaacctgctgtccggcctgccccccagccaccagtggtacaccgtgctggacctgaaggacgccttcttctgcctgagactgcaccccacctctcagcccctgttcgccttcgagtggcgcgaccccgagatgggcatcagcggccagctgacctggaccagactgccacagggctttaagaatagcccaaccctgtttaacgaggccctgcacagggacctggccgacttcaggatccagcaccccgacctgattctgctgcagtacgtggacgacctgctgctggccgctaccagcgagctggactgccagcagggcaccagagccctgctgcagaccctgggcaacctgggctacagagccagcgccaagaaggcccagatctgtcagaagcaggtgaagtatctgggctacctgctgaaggaaggccagagatggctgaccgaggccagaaaggagactgtgatgggccagcccacccccaagacccccaggcagctgcgggagttcctgggcaaggccggcttttgcagactgtttatccctggcttcgccgagatggccgccccactgtaccctctgaccaagcctggcaccctgtttaactggggccccgaccagcagaaggcctaccaggagatcaagcaggccctgctgaccgcccccgccctgggcctgcccgacctgaccaagcctttcgagctgttcgtggacgagaagcagggatacgccaaaggcgtgctgacccagaagctgggcccctggcggaggcccgtggcctacctgagcaaaaaactggaccctgtggccgccggctggcccccatgcctgcggatggtggccgccatcgctgtgctgaccaaggacgccggcaagctgaccatgggccagcccctggtgatcctggcccctcacgccgtggaggctctggtgaagcagcctccagacaggtggctgtccaacgccaggatgacccactaccaggccctgctgctggacaccgaccgggtgcagttcggccctgtggtggccctgaaccccgccaccctgctgcctctgccagaggagggcctgcagcacaactgcctggacatcctggccgaggcccacggcagcggcggctccaaacgcaccgccgacgggagcgagttcgagcccaagaagaagaggaaagtctaa

SEQ ID NO: 284 - DNA, 5838 bp, synthetic construct
  misc_feature 1..5838: note = Description of Artificial Sequence: Synthetic polynucleotide
  source 1..5838: mol_type = other DNA
atgaaacggacagccgacggaagcgagttcgagtcaccaaagaagaagcggaaagtcgacaagaagtacagcatcggcctggacatcggcaccaactctgtgggctgggccgtgatcaccgacgagtacaaggtgcccagcaagaaattcaaggtgctgggcaacaccgaccggcacagcatcaagaagaacctgatcggagccctgctgttcgacagcggcgaaacagccgaggccacccggctgaagagaaccgccagaagaagatacaccagacggaagaaccggatctgctatctgcaagagatcttcagcaacgagatggccaaggtggacgacagcttcttccacagactggaagagtccttcctggtggaagaggataagaagcacgagcggcaccccatcttcggcaacatcgtggacgaggtggcctaccacgagaagtaccccaccatctaccacctgagaaagaaactggtggacagcaccgacaaggccgacctgcggctgatctatctggccctggcccacatgatcaagttccggggccacttcctgatcgagggcgacctgaaccccgacaacagcgacgtggacaagctgttcatccagctggtgcagacctacaaccagctgttcgaggaaaaccccatcaacgccagcggcgtggacgccaaggccatcctgtctgccagactgagcaagagcagacggctggaaaatctgatcgcccagctgcccggcgagaagaagaatggcctgttcggaaacctgattgccctgagcctgggcctgacccccaacttcaagagcaacttcgacctggccgaggatgccaaactgcagctgagcaaggacacctacgacgacgacctggacaacctgctggcccagatcggcgaccagtacgccgacctgtttctggccgccaagaacctgtccgacgccatcctgctgagcgacatcctgagagtgaacaccgagatcaccaaggcccccctgagcgcctctatgatcaagagatacgacgagcaccaccaggacctgaccctgctgaaagctctcgtgcggcagcagctgcctgagaagtacaaagagattttcttcgaccagagcaagaacggctacgccggctacattgacggcggagccagccaggaagagttctacaagttcatcaagcccatcctggaaaagatggacggcaccgaggaactgctcgtgaagctgaacagagaggacctgctgcggaagcagcggaccttcgacaacggcagcatcccccaccagatccacctgggagagctgcacgccattctgcggcggcaggaagatttttacccattcctgaaggacaaccgggaaaagatcgagaagatcctgaccttccgcatcccctactacgtgggccctctggccaggggaaacagcagattcgcctggatgaccagaaagagcgaggaaaccatcaccccctggaacttcgaggaagtggtggacaagggcgcttccgcccagagcttcatcgagcggatgaccaacttcgataagaacctgcccaacgagaaggtgctgcccaagcacagcctgctgtacgagtacttcaccgtgtataacgagctgaccaaagtgaaatacgtgaccgagggaatgagaaagcccgccttcctgagcggcgagcagaaaaaggccatcgtggacctgctgttcaagaccaaccggaaagtgaccgtgaagcagctgaaagaggactacttcaagaaaatcgagtgcttcgactccgtggaaatctccggcgtggaagatcggttcaacgcctccctgggcacataccacgatctgctgaaaattatcaaggacaaggacttcctggacaatgaggaaaacgaggacattctggaagatatcgtgctgaccctgacactgtttgaggacagagagatgatcgaggaacggctgaaaacctatgcccacctgttcgacgacaaagtgatgaagcagctgaagcggcggagatacaccggctggggcaggctgagccggaagctgatcaacggcatccgggacaagcagtccggcaagacaatcctggatttcctgaagtccgacggcttcgccaacagaaacttcatgcagctgatccacgacgacagcctgacctttaaagaggacatccagaaagcccaggtgtccggccagggcgatagcctgcacgagcacattgccaatctggccggcagccccgccattaagaagggcatcctgcagacagtgaaggtggtggacgagctcgtgaaagtgatgggccggcacaagcccgagaacatcgtgatcgaaatggccagagagaaccagaccacccagaagggacagaagaacagccgcgagagaatgaagcggatcgaagagggcatcaaagagctgggcagccagatcctgaaagaacaccccgtggaaaacacccagctgcagaacgagaagctgtacctgtactacctgcagaatgggcgggatatgtacgtggaccaggaactggacatcaaccggctgtccgactacgatgtggacgctatcgtgcctcagagctttctgaaggacgactccatcgacaacaaggtgctgaccagaagcgacaagaaccggggcaagagcgacaacgtgccctccgaagaggtcgtgaagaagatgaagaactactggcggcagctgctgaacgccaagctgattacccagagaaagttcgacaatctgaccaaggccgagagaggcggcctgagcgaactggataaggccggcttcatcaagagacagctggtggaaacccggcagatcacaaagcacgtggcacagatcctggactcccggatgaacactaagtacgacgagaatgacaagctgatccgggaagtgaaagtgatcaccctgaagtccaagctggtgtccgatttccggaaggatttccagttttacaaagtgcgcgagatcaacaactaccaccacgcccacgacgcctacctgaacgccgtcgtgggaaccgccctgatcaaaaagtaccctaagctggaaagcgagttcgtgtacggcgactacaaggtgtacgacgtgcggaagatgatcgccaagagcgagcaggaaatcggcaaggctaccgccaagtacttcttctacagcaacatcatgaactttttcaagaccgagattaccctggccaacggcgagatccggaagcggcctctgatcgagacaaacggcgaaaccggggagatcgtgtgggataagggccgggattttgccaccgtgcggaaagtgctgagcatgccccaagtgaatatcgtgaaaaagaccgaggtgcagacaggcggcttcagcaaagagtctatcctgcccaagaggaacagcgataagctgatcgccagaaagaaggactgggaccctaagaagtacggcggcttcgacagccccaccgtggcctattctgtgctggtggtggccaaagtggaaaagggcaagtccaagaaactgaagagtgtgaaagagctgctggggatcaccatcatggaaagaagcagcttcgagaagaatcccatcgactttctggaagccaagggctacaaagaagtgaaaaaggacctgatcatcaagctgcctaagtactccctgttcgagctggaaaacggccggaagagaatgctggcctctgccggcgaactgcagaagggaaacgaactggccctgccctccaaatatgtgaacttcctgtacctggccagccactatgagaagctgaagggctcccccgaggataatgagcagaaacagctgtttgtggaacagcacaagcactacctggacgagatcatcgagcagatcagcgagttctccaagagagtgatcctggccgacgctaatctggacaaagtgctgtccgcctacaacaagcaccgggataagcccatcagagagcaggccgagaatatcatccacctgtttaccctgaccaatctgggagcccctgccgccttcaagtactttgacaccaccatcgaccggaagaggtacactagcaccaaagaggtgctggacgccaccctgatccaccagagcatcaccggcctgtacgagacacggatcgacctgtctcagctgggaggtgactccggcggctcctccggcggaagcagcggcggcagcagcggcggaagcagcggcggcagcagcggcggaagctctggcggatctagcggcggctctaccctgaacatcgaggacgagtacaggctgcacgagaccagcaaggagcccgacgtgagcctgggcagcacctggctgagcgatttccctcaggcttgggccgagaccggcggcatgggcctggccgtgcggcaggcccccctgattatccccctgaaggccaccagcacccccgtgagcatcaagcagtacccaatgtcccaggaggccaggctgggcatcaagcctcacatccagaggctgctggaccagggcatcctggtgccatgccagtccccctggaacacccctctgctgcccgtgaagaagcctggcaccaacgactaccggcccgtgcaggacctgagagaagtgaacaagcgggtggaggacatccacccaaccgtgcccaacccttacaacctgctgtccggcctgccccccagccaccagtggtacaccgtgctggacctgaaggacgccttcttctgcctgagactgcaccccacctctcagcccctgttcgccttcgagtggcgcgaccccgagatgggcatcagcggccagctgacctggaccagactgccacagggctttaagaatagcccaaccctgtttaacgaggccctgcacagggacctggccgacttcaggatccagcaccccgacctgattctgctgcagtacgtggacgacctgctgctggccgctaccagcgagctggactgccagcagggcaccagagccctgctgcagaccctgggcaacctgggctacagagccagcgccaagaaggcccagatctgtcagaagcaggtgaagtatctgggctacctgctgaaggaaggccagagatggctgaccgaggccagaaaggagactgtgatgggccagcccacccccaagacccccaggcagctgcgggagttcctgggcaaggccggcttttgcagactgtttatccctggcttcgccgagatggccgccccactgtaccctctgaccaagcctggcaccctgtttaactggggccccgaccagcagaaggcctaccaggagatcaagcaggccctgctgaccgcccccgccctgggcctgcccgacctgaccaagcctttcgagctgttcgtggacgagaagcagggatacgccaaaggcgtgctgacccagaagctgggcccctggcggaggcccgtggcctacctgagcaaaaaactggaccctgtggccgccggctggcccccatgcctgcggatggtggccgccatcgctgtgctgaccaaggacgccggcaagctgaccatgggccagcccctggtgatcctggcccctcacgccgtggaggctctggtgaagcagcctccagacaggtggctgtccaacgccaggatgacccactaccaggccctgctgctggacaccgaccgggtgcagttcggccctgtggtggccctgaaccccgccaccctgctgcctctgccagaggagggcctgcagcacaactgcctggacatcctggccgaggcccacggcagcggcggctccaaacgcaccgccgacgggagcgagttcgagcccaagaagaagaggaaagtctaatagtga

SEQ ID NO: 285 - RNA, 5838 nt, synthetic construct
  misc_feature 1..5838: note = Description of Artificial Sequence: Synthetic polynucleotide
  source 1..5838: mol_type = other RNA
atgaaacggacagccgacggaagcgagttcgagtcaccaaagaagaagcggaaagtcgacaagaagtacagcatcggcctggacatcggcaccaactctgtgggctgggccgtgatcaccgacgagtacaaggtgcccagcaagaaattcaaggtgctgggcaacaccgaccggcacagcatcaagaagaacctgatcggagccctgctgttcgacagcggcgaaacagccgaggccacccggctgaagagaaccgccagaagaagatacaccagacggaagaaccggatctgctatctgcaagagatcttcagcaacgagatggccaaggtggacgacagcttcttccacagactggaagagtccttcctggtggaagaggataagaagcacgagcggcaccccatcttcggcaacatcgtggacgaggtggcctaccacgagaagtaccccaccatctaccacctgagaaagaaactggtggacagcaccgacaaggccgacctgcggctgatctatctggccctggcccacatgatcaagttccggggccacttcctgatcgagggcgacctgaaccccgacaacagcgacgtggacaagctgttcatccagctggtgcagacctacaaccagctgttcgaggaaaaccccatcaacgccagcggcgtggacgccaaggccatcctgtctgccagactgagcaagagcagacggctggaaaatctgatcgcccagctgcccggcgagaagaagaatggcctgttcggaaacctgattgccctgagcctgggcctgacccccaacttcaagagcaacttcgacctggccgaggatgccaaactgcagctgagcaaggacacctacgacgacgacctggacaacctgctggcccagatcggcgaccagtacgccgacctgtttctggccgccaagaacctgtccgacgccatcctgctgagcgacatcctgagagtgaacaccgagatcaccaaggcccccctgagcgcctctatgatcaagagatacgacgagcaccaccaggacctgaccctgctgaaagctctcgtgcggcagcagctgcctgagaagtacaaagagattttcttcgaccagagcaagaacggctacgccggctacattgacggcggagccagccaggaagagttctacaagttcatcaagcccatcctggaaaagatggacggcaccgaggaactgctcgtgaagctgaacagagaggacctgctgcggaagcagcggaccttcgacaacggcagcatcccccaccagatccacctgggagagctgcacgccattctgcggcggcaggaagatttttacccattcctgaaggacaaccgggaaaagatcgagaagatcctgaccttccgcatcccctactacgtgggccctctggccaggggaaacagcagattcgcctggatgaccagaaagagcgaggaaaccatcaccccctggaacttcgaggaagtggtggacaagggcgcttccgcccagagcttcatcgagcggatgaccaacttcgataagaacctgcccaacgagaaggtgctgcccaagcacagcctgctgtacgagtacttcaccgtgtataacgagctgaccaaagtgaaatacgtgaccgagggaatgagaaagcccgccttcctgagcggcgagcagaaaaaggccatcgtggacctgctgttcaagaccaaccggaaagtgaccgtgaagcagctgaaagaggactacttcaagaaaatcgagtgcttcgactccgtggaaatctccggcgtggaagatcggttcaacgcctccctgggcacataccacgatctgctgaaaattatcaaggacaaggacttcctggacaatgaggaaaacgaggacattctggaagatatcgtgctgaccctgacactgtttgaggacagagagatgatcgaggaacggctgaaaacctatgcccacctgttcgacgacaaagtgatgaagcagctgaagcggcggagatacaccggctggggcaggctgagccggaagctgatcaacggcatccgggacaagcagtccggcaagacaatcctggatttcctgaagtccgacggcttcgccaacagaaacttcatgcagctgatccacgacgacagcctgacctttaaagaggacatccagaaagcccaggtgtccggccagggcgatagcctgcacgagcacattgccaatctggccggcagccccgccattaagaagggcatcctgcagacagtgaaggtggtggacgagctcgtgaaagtgatgggccggcacaagcccgagaacatcgtgatcgaaatggccagagagaaccagaccacccagaagggacagaagaacagccgcgagagaatgaagcggatcgaagagggcatcaaagagctgggcagccagatcctgaaagaacaccccgtggaaaacacccagctgcagaacgagaagctgtacctgtactacctgcagaatgggcgggatatgtacgtggaccaggaactggacatcaaccggctgtccgactacgatgtggacgctatcgtgcctcagagctttctgaaggacgactccatcgacaacaaggtgctgaccagaagcgacaagaaccggggcaagagcgacaacgtgccctccgaagaggtcgtgaagaagatgaagaactactggcggcagctgctgaacgccaagctgattacccagagaaagttcgacaatctgaccaaggccgagagaggcggcctgagcgaactggataaggccggcttcatcaagagacagctggtggaaacccggcagatcacaaagcacgtggcacagatcctggactcccggatgaacactaagtacgacgagaatgacaagctgatccgggaagtgaaagtgatcaccctgaagtccaagctggtgtccgatttccggaaggatttccagttttacaaagtgcgcgagatcaacaactaccaccacgcccacgacgcctacctgaacgccgtcgtgggaaccgccctgatcaaaaagtaccctaagctggaaagcgagttcgtgtacggcgactacaaggtgtacgacgtgcggaagatgatcgccaagagcgagcaggaaatcggcaaggctaccgccaagtacttcttctacagcaacatcatgaactttttcaagaccgagattaccctggccaacggcgagatccggaagcggcctctgatcgagacaaacggcgaaaccggggagatcgtgtgggataagggccgggattttgccaccgtgcggaaagtgctgagcatgccccaagtgaatatcgtgaaaaagaccgaggtgcagacaggcggcttcagcaaagagtctatcctgcccaagaggaacagcgataagctgatcgccagaaagaaggactgggaccctaagaagtacggcggcttcgacagccccaccgtggcctattctgtgctggtggtggccaaagtggaaaagggcaagtccaagaaactgaagagtgtgaaagagctgctggggatcaccatcatggaaagaagcagcttcgagaagaatcccatcgactttctggaagccaagggctacaaagaagtgaaaaaggacctgatcatcaagctgcctaagtactccctgttcgagctggaaaacggccggaagagaatgctggcctctgccggcgaactgcagaagggaaacgaactggccctgccctccaaatatgtgaacttcctgtacctggccagccactatgagaagctgaagggctcccccgaggataatgagcagaaacagctgtttgtggaacagcacaagcactacctggacgagatcatcgagcagatcagcgagttctccaagagagtgatcctggccgacgctaatctggacaaagtgctgtccgcctacaacaagcaccgggataagcccatcagagagcaggccgagaatatcatccacctgtttaccctgaccaatctgggagcccctgccgccttcaagtactttgacaccaccatcgaccggaagaggtacactagcaccaaagaggtgctggacgccaccctgatccaccagagcatcaccggcctgtacgagacacggatcgacctgtctcagctgggaggtgactccggcggctcctccggcggaagcagcggcggcagcagcggcggaagcagcggcggcagcagcggcggaagctctggcggatctagcggcggctctaccctgaacatcgaggacgagtacaggctgcacgagaccagcaaggagcccgacgtgagcctgggcagcacctggctgagcgatttccctcaggcttgggccgagaccggcggcatgggcctggccgtgcggcaggcccccctgattatccccctgaaggccaccagcacccccgtgagcatcaagcagtacccaatgtcccaggaggccaggctgggcatcaagcctcacatccagaggctgctggaccagggcatcctggtgccatgccagtccccctggaacacccctctgctgcccgtgaagaagcctggcaccaacgactaccggcccgtgcaggacctgagagaagtgaacaagcgggtggaggacatccacccaaccgtgcccaacccttacaacctgctgtccggcctgccccccagccaccagtggtacaccgtgctggacctgaaggacgccttcttctgcctgagactgcaccccacctctcagcccctgttcgccttcgagtggcgcgaccccgagatgggcatcagcggccagctgacctggaccagactgccacagggctttaagaatagcccaaccctgtttaacgaggccctgcacagggacctggccgacttcaggatccagcaccccgacctgattctgctgcagtacgtggacgacctgctgctggccgctaccagcgagctggactgccagcagggcaccagagccctgctgcagaccctgggcaacctgggctacagagccagcgccaagaaggcccagatctgtcagaagcaggtgaagtatctgggctacctgctgaaggaaggccagagatggctgaccgaggccagaaaggagactgtgatgggccagcccacccccaagacccccaggcagctgcgggagttcctgggcaaggccggcttttgcagactgtttatccctggcttcgccgagatggccgccccactgtaccctctgaccaagcctggcaccctgtttaactggggccccgaccagcagaaggcctaccaggagatcaagcaggccctgctgaccgcccccgccctgggcctgcccgacctgaccaagcctttcgagctgttcgtggacgagaagcagggatacgccaaaggcgtgctgacccagaagctgggcccctggcggaggcccgtggcctacctgagcaaaaaactggaccctgtggccgccggctggcccccatgcctgcggatggtggccgccatcgctgtgctgaccaaggacgccggcaagctgaccatgggccagcccctggtgatcctggcccctcacgccgtggaggctctggtgaagcagcctccagacaggtggctgtccaacgccaggatgacccactaccaggccctgctgctggacaccgaccgggtgcagttcggccctgtggtggccctgaaccccgccaccctgctgcctctgccagaggagggcctgcagcacaactgcctggacatcctggccgaggcccacggcagcggcggctccaaacgcaccgccgacgggagcgagttcgagcccaagaagaagaggaaagtctaatagtga

SEQ ID NO: 286-287 - skipped (2 entries)

SEQ ID NO: 288 - protein, 4 aa, synthetic construct
  REGION 1..4: note = Description of Artificial Sequence: Synthetic peptide
SGGS

SEQ ID NO: 289 - protein, 33 aa, synthetic construct
  REGION 1..33: note = Description of Artificial Sequence: Synthetic peptide
SGGSSGGSSGSETPGTSESATPESSGGSSGGSS

SEQ ID NO: 290 - protein, 48 aa, synthetic construct
  REGION 1..48: note = Description of Artificial Sequence: Synthetic polypeptide
SGGSSGGSSGSETPGTSESATPESSGSETPGTSESATPESSGGSSGGS

SEQ ID NO: 291 - protein, 40 aa, synthetic construct
  REGION 1..40: note = Description of Artificial Sequence: Synthetic polypeptide
SGGSSGSETPGTSESATPESSGSETPGTSESATPESSGGS

SEQ ID NO: 292 - protein, 28 aa, synthetic construct
  REGION 1..28: note = Description of Artificial Sequence: Synthetic peptide
SGGSSGGSSGSETPGTSESATPESSGGS

SEQ ID NO: 293 - protein, 24 aa, synthetic construct
  REGION 1..24: note = Description of Artificial Sequence: Synthetic peptide
SGGSSGSETPGTSESATPESSGGS

SEQ ID NO: 294 - protein, 20 aa, synthetic construct
  REGION 1..20: note = Description of Artificial Sequence: Synthetic peptide
SGGSSGSETPGTSESATPES

SEQ ID NO: 295 - protein, 16 aa, synthetic construct
  REGION 1..16: note = Description of Artificial Sequence: Synthetic peptide
SGSETPGTSESATPES

SEQ ID NO: 296 - protein, 32 aa, synthetic construct
  REGION 1..32: note = Description of Artificial Sequence: Synthetic polypeptide
SGGSSGGSSGSETPGTSESATPESSGGSSGGS

SEQ ID NO: 297 - protein, 41 aa, synthetic construct
  REGION 1..41: note = Description of Artificial Sequence: Synthetic polypeptide
SGGSPAPAPAPAPAPAPAPAPAPAPAPAPAPAPAPAPSGGS

SEQ ID NO: 298 - protein, 33 aa, synthetic construct
  REGION 1..33: note = Description of Artificial Sequence: Synthetic polypeptide
SGGSPAPAPAPAPAPAPAPAPAPAPAPAPSGGS

SEQ ID NO: 299 - protein, 25 aa, synthetic construct
  REGION 1..25: note = Description of Artificial Sequence: Synthetic peptide
SGGSPAPAPAPAPAPAPAPAPSGGS

SEQ ID NO: 300 - protein, 19 aa, synthetic construct
  REGION 1..19: note = Description of Artificial Sequence: Synthetic peptide
SGGSPAPAPAPAPAPSGGS

SEQ ID NO: 301 - protein, 40 aa, synthetic construct
  REGION 1..40: note = Description of Artificial Sequence: Synthetic polypeptide
SGGSSGGSSGGSSGGSSGGSSGGSSGGSSGGSSGGSSGGS

SEQ ID NO: 302 - protein, 32 aa, synthetic construct
  REGION 1..32: note = Description of Artificial Sequence: Synthetic polypeptide
SGGSSGGSSGGSSGGSSGGSSGGSSGGSSGGS

SEQ ID NO: 303 - protein, 24 aa, synthetic construct
  REGION 1..24: note = Description of Artificial Sequence: Synthetic peptide
SGGSSGGSSGGSSGGSSGGSSGGS

SEQ ID NO: 304 - protein, 20 aa, synthetic construct
  REGION 1..20: note = Description of Artificial Sequence: Synthetic peptide
SGGSSGGSSGGSSGGSSGGS

SEQ ID NO: 305 - protein, 16 aa, synthetic construct
  REGION 1..16: note = Description of Artificial Sequence: Synthetic peptide
SGGSSGGSSGGSSGGS

SEQ ID NO: 306 - protein, 48 aa, synthetic construct
  REGION 1..48: note = Description of Artificial Sequence: Synthetic polypeptide
SGGSEAAAKEAAAKEAAAKEAAAKEAAAKEAAAKEAAAKEAAAKSGGS

SEQ ID NO: 307 - protein, 38 aa, synthetic construct
  REGION 1..38: note = Description of Artificial Sequence: Synthetic polypeptide
SGGSEAAAKEAAAKEAAAKEAAAKEAAAKEAAAKSGGS

SEQ ID NO: 308 - protein, 22 aa, synthetic construct
  REGION 1..22: note = Description of Artificial Sequence: Synthetic peptide
AEAAAKEAAAKEAAAKEAAAKA

SEQ ID NO: 309 - protein, 28 aa, synthetic construct
  REGION 1..28: note = Description of Artificial Sequence: Synthetic peptide
SGGSEAAAKEAAAKEAAAKEAAAKSGGS

SEQ ID NO: 310 - protein, 23 aa, synthetic construct
  REGION 1..23: note = Description of Artificial Sequence: Synthetic peptide
SGGSEAAAKEAAAKEAAAKSGGS

SEQ ID NO: 311 - protein, 18 aa, synthetic construct
  REGION 1..18: note = Description of Artificial Sequence: Synthetic peptide
SGGSEAAAKEAAAKSGGS

SEQ ID NO: 312 - protein, 33 aa, synthetic construct
  REGION 1..33: note = Description of Artificial Sequence: Synthetic polypeptide
GGGSSGGSSGSETPGTSESATPESSGGSSGGSS

SEQ ID NO: 313 - protein, 48 aa, synthetic construct
  REGION 1..48: note = Description of Artificial Sequence: Synthetic polypeptide
GGGSSGGSSGSETPGTSESATPESSGSETPGTSESATPESSGGSSGGS

SEQ ID NO: 314 - protein, 40 aa, synthetic construct
  REGION 1..40: note = Description of Artificial Sequence: Synthetic polypeptide
GGGSSGSETPGTSESATPESSGSETPGTSESATPESSGGS

SEQ ID NO: 315 - protein, 28 aa, synthetic construct
  REGION 1..28: note = Description of Artificial Sequence: Synthetic peptide
GGGSSGGSSGSETPGTSESATPESSGGS

SEQ ID NO: 316 - protein, 24 aa, synthetic construct
  REGION 1..24: note = Description of Artificial Sequence: Synthetic peptide
GGGSSGSETPGTSESATPESSGGS

SEQ ID NO: 317 - protein, 20 aa, synthetic construct
  REGION 1..20: note = Description of Artificial Sequence: Synthetic peptide
GGGSSGSETPGTSESATPES

SEQ ID NO: 318 - protein, 16 aa, synthetic construct
  REGION 1..16: note = Description of Artificial Sequence: Synthetic peptide
GGSETPGTSESATPES

SEQ ID NO: 319 - protein, 32 aa, synthetic construct
  REGION 1..32: note = Description of Artificial Sequence: Synthetic polypeptide
GGGSSGGSSGSETPGTSESATPESSGGSSGGS

SEQ ID NO: 320 - protein, 41 aa, synthetic construct
  REGION 1..41: note = Description of Artificial Sequence: Synthetic polypeptide
GGGSPAPAPAPAPAPAPAPAPAPAPAPAPAPAPAPAPSGGS

SEQ ID NO: 321 - protein, 33 aa, synthetic construct
  REGION 1..33: note = Description of Artificial Sequence: Synthetic polypeptide
GGGSPAPAPAPAPAPAPAPAPAPAPAPAPSGGS

SEQ ID NO: 322 - protein, 25 aa, synthetic construct
  REGION 1..25: note = Description of Artificial Sequence: Synthetic peptide
GGGSPAPAPAPAPAPAPAPAPSGGS

SEQ ID NO: 323 - protein, 19 aa, synthetic construct
  REGION 1..19: note = Description of Artificial Sequence: Synthetic peptide
GGGSPAPAPAPAPAPSGGS

SEQ ID NO: 324 - protein, 40 aa, synthetic construct
  REGION 1..40: note = Description of Artificial Sequence: Synthetic polypeptide
GGGSSGGSSGGSSGGSSGGSSGGSSGGSSGGSSGGSSGGS

SEQ ID NO: 325 - protein, 32 aa, synthetic construct
  REGION 1..32: note = Description of Artificial Sequence: Synthetic polypeptide
GGGSSGGSSGGSSGGSSGGSSGGSSGGSSGGS

SEQ ID NO: 326 - protein, 24 aa, synthetic construct
  REGION 1..24: note = Description of Artificial Sequence: Synthetic peptide
GGGSSGGSSGGSSGGSSGGSSGGS

SEQ ID NO: 327 - protein, 20 aa, synthetic construct
  REGION 1..20: note = Description of Artificial Sequence: Synthetic peptide
GGGSSGGSSGGSSGGSSGGS

SEQ ID NO: 328 - protein, 16 aa, synthetic construct
  REGION 1..16: note = Description of Artificial Sequence: Synthetic peptide
GGGSSGGSSGGSSGGS

SEQ ID NO: 329 - protein, 48 aa, synthetic construct
  REGION 1..48: note = Description of Artificial Sequence: Synthetic polypeptide
GGGSEAAAKEAAAKEAAAKEAAAKEAAAKEAAAKEAAAKEAAAKSGGS

SEQ ID NO: 330 - protein, 38 aa, synthetic construct
  REGION 1..38: note = Description of Artificial Sequence: Synthetic polypeptide
GGGSEAAAKEAAAKEAAAKEAAAKEAAAKEAAAKSGGS

SEQ ID NO: 331 - protein, 22 aa, synthetic construct
  REGION 1..22: note = Description of Artificial Sequence: Synthetic peptide
GEAAAKEAAAKEAAAKEAAAKA

SEQ ID NO: 332 - protein, 28 aa, synthetic construct
  REGION 1..28: note = Description of Artificial Sequence: Synthetic peptide
GGGSEAAAKEAAAKEAAAKEAAAKSGGS

SEQ ID NO: 333 - protein, 23 aa, synthetic construct
  REGION 1..23: note = Description of Artificial Sequence: Synthetic peptide
GGGSEAAAKEAAAKEAAAKSGGS

SEQ ID NO: 334 - protein, 18 aa, synthetic construct
  REGION 1..18: note = Description of Artificial Sequence: Synthetic peptide
GGGSEAAAKEAAAKSGGS

SEQ ID NO: 335 - protein, 47 aa, synthetic construct
  REGION 1..47: note = Description of Artificial Sequence: Synthetic polypeptide
SGGSEAAAKEAAAKSGGSSGGSSGSETPGTSESATPESSGGSSGGSS

SEQ ID NO: 336 - protein, 62 aa, synthetic construct
  REGION 1..62: note = Description of Artificial Sequence: Synthetic polypeptide
SGGSEAAAKEAAAKSGGSSGGSSGSETPGTSESATPESSGSETPGTSESATPESSGGSSGGS

SEQ ID NO: 337 - protein, 54 aa, synthetic construct
  REGION 1..54: note = Description of Artificial Sequence: Synthetic polypeptide
SGGSEAAAKEAAAKSGGSSGSETPGTSESATPESSGSETPGTSESATPESSGGS

SEQ ID NO: 338 - protein, 42 aa, synthetic construct
  REGION 1..42: note = Description of Artificial Sequence: Synthetic polypeptide
SGGSEAAAKEAAAKSGGSSGGSSGSETPGTSESATPESSGGS

SEQ ID NO: 339 - protein, 38 aa, synthetic construct
  REGION 1..38: note = Description of Artificial Sequence: Synthetic polypeptide
SGGSEAAAKEAAAKSGGSSGSETPGTSESATPESSGGS

SEQ ID NO: 340 - protein, 34 aa, synthetic construct
  REGION 1..34: note = Description of Artificial Sequence: Synthetic polypeptide
SGGSEAAAKEAAAKSGGSSGSETPGTSESATPES

SEQ ID NO: 341 - protein, 30 aa, synthetic construct
  REGION 1..30: note = Description of Artificial Sequence: Synthetic polypeptide
SGGSEAAAKEAAAKSGSETPGTSESATPES

SEQ ID NO: 342 - protein, 46 aa, synthetic construct
  REGION 1..46: note = Description of Artificial Sequence: Synthetic polypeptide
SGGSEAAAKEAAAKSGGSSGGSSGSETPGTSESATPESSGGSSGGS

SEQ ID NO: 343 - protein, 55 aa, synthetic construct
  REGION 1..55: note = Description of Artificial Sequence: Synthetic polypeptide
SGGSEAAAKEAAAKSGGSPAPAPAPAPAPAPAPAPAPAPAPAPAPAPAPAPSGGS

SEQ ID NO: 344 - protein, 47 aa, synthetic construct
  REGION 1..47: note = Description of Artificial Sequence: Synthetic polypeptide
SGGSEAAAKEAAAKSGGSPAPAPAPAPAPAPAPAPAPAPAPAPSGGS

SEQ ID NO: 345 - protein, 39 aa, synthetic construct
  REGION 1..39: note = Description of Artificial Sequence: Synthetic polypeptide
SGGSEAAAKEAAAKSGGSPAPAPAPAPAPAPAPAPSGGS

SEQ ID NO: 346 - protein, 33 aa, synthetic construct
  REGION 1..33: note = Description of Artificial Sequence: Synthetic polypeptide
SGGSEAAAKEAAAKSGGSPAPAPAPAPAPSGGS

SEQ ID NO: 347 - protein, 54 aa, synthetic construct
  REGION 1..54: note = Description of Artificial Sequence: Synthetic polypeptide
SGGSEAAAKEAAAKSGGSSGGSSGGSSGGSSGGSSGGSSGGSSGGSSGGSSGGS

SEQ ID NO: 348 - protein, 46 aa, synthetic construct
  REGION 1..46: note = Description of Artificial Sequence: Synthetic polypeptide
SGGSEAAAKEAAAKSGGSSGGSSGGSSGGSSGGSSGGSSGGSSGGS

SEQ ID NO: 349 - protein, 38 aa, synthetic construct
  REGION 1..38: note = Description of Artificial Sequence: Synthetic polypeptide
SGGSEAAAKEAAAKSGGSSGGSSGGSSGGSSGGSSGGS

SEQ ID NO: 350 - protein, 34 aa, synthetic construct
  REGION 1..34: note = Description of Artificial Sequence: Synthetic polypeptide
SGGSEAAAKEAAAKSGGSSGGSSGGSSGGSSGGS

SEQ ID NO: 351 - protein, 30 aa, synthetic construct
  REGION 1..30: note = Description of Artificial Sequence: Synthetic polypeptide
SGGSEAAAKEAAAKSGGSSGGSSGGSSGGS

SEQ ID NO: 352 - protein, 62 aa, synthetic construct
  REGION 1..62: note = Description of Artificial Sequence: Synthetic polypeptide
SGGSEAAAKEAAAKSGGSEAAAKEAAAKEAAAKEAAAKEAAAKEAAAKEAAAKEAAAKSGGS

SEQ ID NO: 353 - protein, 52 aa, synthetic construct
  REGION 1..52: note = Description of Artificial Sequence: Synthetic polypeptide
SGGSEAAAKEAAAKSGGSEAAAKEAAAKEAAAKEAAAKEAAAKEAAAKSGGS

SEQ ID NO: 354 - protein, 36 aa, synthetic construct
  REGION 1..36: note = Description of Artificial Sequence: Synthetic polypeptide
SGGSEAAAKEAAAKAEAAAKEAAAKEAAAKEAAAKA

SEQ ID NO: 355 - protein, 42 aa, synthetic construct
  REGION 1..42: note = Description of Artificial Sequence: Synthetic polypeptide
SGGSEAAAKEAAAKSGGSEAAAKEAAAKEAAAKEAAAKSGGS

SEQ ID NO: 356 - protein, 37 aa, synthetic construct
  REGION 1..37: note = Description of Artificial Sequence: Synthetic polypeptide
SGGSEAAAKEAAAKSGGSEAAAKEAAAKEAAAKSGGS

SEQ ID NO: 357 - protein, 32 aa, synthetic construct
  REGION 1..32: note = Description of Artificial Sequence: Synthetic polypeptide
SGGSEAAAKEAAAKSGGSEAAAKEAAAKSGGS

SEQ ID NO: 358 - protein, 44 aa, synthetic construct
  REGION 1..44: note = Description of Artificial Sequence: Synthetic polypeptide
SGGSSGGSSGGSSGGSSGGSSGGSSGGSSGGSSGGSSGGSSGGS

SEQ ID NO: 359 - protein, 48 aa, synthetic construct
  REGION 1..48: note = Description of Artificial Sequence: Synthetic polypeptide
SGGSSGGSSGGSSGGSSGGSSGGSSGGSSGGSSGGSSGGSSGGSSGGS

SEQ ID NO: 360 - protein, 52 aa, synthetic construct
  REGION 1..52: note = Description of Artificial Sequence: Synthetic polypeptide
SGGSSGGSSGGSSGGSSGGSSGGSSGGSSGGSSGGSSGGSSGGSSGGSSGGS

SEQ ID NO: 361 - protein, 29 aa, synthetic construct
  REGION 1..29: note = Description of Artificial Sequence: Synthetic peptide
SGGSGGSGSETPGTSESATPESSGGSGGS

SEQ ID NO: 362 - protein, 45 aa, synthetic construct
  REGION 1..45: note = Description of Artificial Sequence: Synthetic polypeptide
SGGSGGSGSETPGTSESATPESSGSETPGTSESATPESSGGSGGS

SEQ ID NO: 363 - protein, 39 aa, synthetic construct
  REGION 1..39: note = Description of Artificial Sequence: Synthetic polypeptide
SGGSGSETPGTSESATPESSGSETPGTSESATPESSGGS

SEQ ID NO: 364 - protein, 26 aa, synthetic construct
  REGION 1..26: note = Description of Artificial Sequence: Synthetic peptide
SGGSGGSGSETPGTSESATPESSGGS

SEQ ID NO: 365 - protein, 23 aa, synthetic construct
  REGION 1..23: note = Description of Artificial Sequence: Synthetic peptide
SGGSGSETPGTSESATPESSGGS

SEQ ID NO: 366 - protein, 19 aa, synthetic construct
  REGION 1..19: note = Description of Artificial Sequence: Synthetic peptide
SGGSGSETPGTSESATPES

SEQ ID NO: 367 - protein, 31 aa, synthetic construct
  REGION 1..31: note = Description of Artificial Sequence: Synthetic polypeptide
SGGSGGSGGSGGSGGSGGSGGSGGSGGSGGS

SEQ ID NO: 368 - protein, 25 aa, synthetic construct
  REGION 1..25: note = Description of Artificial Sequence: Synthetic peptide
SGGSGGSGGSGGSGGSGGSGGSGGS

SEQ ID NO: 369 - protein, 19 aa, synthetic construct
  REGION 1..19: note = Description of Artificial Sequence: Synthetic peptide
SGGSGGSGGSGGSGGSGGS

SEQ ID NO: 370 - protein, 16 aa, synthetic construct
  REGION 1..16: note = Description of Artificial Sequence: Synthetic peptide
SGGSGGSGGSGGSGGS

SEQ ID NO: 371 - protein, 13 aa, synthetic construct
  REGION 1..13: note = Description of Artificial Sequence: Synthetic peptide
SGGSGGSGGSGGS

SEQ ID NO: 372 - protein, 40 aa, synthetic construct
  REGION 1..40: note = Description of Artificial Sequence: Synthetic polypeptide
GGSPAPAPAPAPAPAPAPAPAPAPAPAPAPAPAPAPSGGS

SEQ ID NO: 373 - protein, 32 aa, synthetic construct
  REGION 1..32: note = Description of Artificial Sequence: Synthetic polypeptide
GGSPAPAPAPAPAPAPAPAPAPAPAPAPSGGS

SEQ ID NO: 374 - protein, 24 aa, synthetic construct
  REGION 1..24: note = Description of Artificial Sequence: Synthetic peptide
GGSPAPAPAPAPAPAPAPAPSGGS

SEQ ID NO: 375 - protein, 18 aa, synthetic construct
  REGION 1..18: note = Description of Artificial Sequence: Synthetic peptide
GGSPAPAPAPAPAPSGGS

SEQ ID NO: 376 - protein, 150 aa, synthetic construct
  REGION 1..150: note = Description of Artificial Sequence: Synthetic polypeptide
  VARIANT 6..150: note = GGGGS repeats may be deleted
GGGGSGGGGSGGGGSGGGGSGGGGSGGGGSGGGGSGGGGSGGGGSGGGGSGGGGSGGGGSGGGGSGGGGSGGGGSGGGGSGGGGSGGGGSGGGGSGGGGSGGGGSGGGGSGGGGSGGGGSGGGGSGGGGSGGGGSGGGGSGGGGSGGGGS

SEQ ID NO: 377 - protein, 30 aa, synthetic construct
  REGION 1..30: note = Description of Artificial Sequence: Synthetic polypeptide
  VARIANT 2..30: note = Residues may be deleted
GGGGGGGGGGGGGGGGGGGGGGGGGGGGGG

SEQ ID NO: 378 - protein, 150 aa, synthetic construct
  REGION 1..150: note = Description of Artificial Sequence: Synthetic polypeptide
  VARIANT 6..150: note = EAAAK repeats may be deleted
EAAAKEAAAKEAAAKEAAAKEAAAKEAAAKEAAAKEAAAKEAAAKEAAAKEAAAKEAAAKEAAAKEAAAKEAAAKEAAAKEAAAKEAAAKEAAAKEAAAKEAAAKEAAAKEAAAKEAAAKEAAAKEAAAKEAAAKEAAAKEAAAKEAAAK

SEQ ID NO: 379 - protein, 90 aa, synthetic construct
  REGION 1..90: note = Description of Artificial Sequence: Synthetic polypeptide
  VARIANT 4..90: note = GGS repeats may be deleted
GGSGGSGGSGGSGGSGGSGGSGGSGGSGGSGGSGGSGGSGGSGGSGGSGGSGGSGGSGGSGGSGGSGGSGGSGGSGGSGGSGGSGGSGGS

SEQ ID NO: 380 - protein, 120 aa, synthetic construct
  REGION 1..120: note = Description of Artificial Sequence: Synthetic polypeptide
  VARIANT 5..120: note = SGGS repeats may be deleted
SGGSSGGSSGGSSGGSSGGSSGGSSGGSSGGSSGGSSGGSSGGSSGGSSGGSSGGSSGGSSGGSSGGSSGGSSGGSSGGSSGGSSGGSSGGSSGGSSGGSSGGSSGGSSGGSSGGSSGGS

SEQ ID NO: 381 - protein, 120 aa, synthetic construct
  REGION 1..120: note = Description of Artificial Sequence: Synthetic polypeptide
  VARIANT 5..120: note = GGSS repeats may be deleted
GGSSGGSSGGSSGGSSGGSSGGSSGGSSGGSSGGSSGGSSGGSSGGSSGGSSGGSSGGSSGGSSGGSSGGSSGGSSGGSSGGSSGGSSGGSSGGSSGGSSGGSSGGSSGGSSGGSSGGSS

SEQ ID NO: 382 - protein, 60 aa, synthetic construct
  REGION 1..60: note = Description of Artificial Sequence: Synthetic polypeptide
  VARIANT 1: note = Any amino acid
  VARIANT 3: note = Any amino acid
  VARIANT 5: note = Any amino acid
  VARIANT 7: note = Any amino acid
  VARIANT 9: note = Any amino acid
  VARIANT 11: note = Any amino acid
  VARIANT 13: note = Any amino acid
  VARIANT 15: note = Any amino acid
  VARIANT 17: note = Any amino acid
  VARIANT 19: note = Any amino acid
  VARIANT 21: note = Any amino acid
  VARIANT 23: note = Any amino acid
  VARIANT 25: note = Any amino acid
  VARIANT 27: note = Any amino acid
  VARIANT 29: note = Any amino acid
  VARIANT 31: note = Any amino acid
  VARIANT 33: note = Any amino acid
  VARIANT 35: note = Any amino acid
  VARIANT 37: note = Any amino acid
  VARIANT 39: note = Any amino acid
  VARIANT 41: note = Any amino acid
  VARIANT 43: note = Any amino acid
  VARIANT 45: note = Any amino acid
  VARIANT 47: note = Any amino acid
  VARIANT 49: note = Any amino acid
  VARIANT 51: note = Any amino acid
  VARIANT 53: note = Any amino acid
  VARIANT 55: note = Any amino acid
  VARIANT 57: note = Any amino acid
  VARIANT 59: note = Any amino acid
  VARIANT 3..60: note = XP repeats may be deleted
XPXPXPXPXPXPXPXPXPXPXPXPXPXPXPXPXPXPXPXPXPXPXPXPXPXPXPXPXPXP

SEQ ID NO: 383 - protein, 10 aa, synthetic construct
  REGION 1..10: note = Description of Artificial Sequence: Synthetic peptide
SGGSGGSGGS

SEQ ID NO: 384 - protein, 60 aa, synthetic construct
  REGION 1..60: note = Description of Artificial Sequence: Synthetic polypeptide
SGGSSGGSSGSETPGTSESATPESAGSYPYDVPDYAGSAAPAAKKKKLDGSGSGGSSGGS

SEQ ID NO: 385 - protein, 51 aa, synthetic construct
  REGION 1..51: note = Description of Artificial Sequence: Synthetic polypeptide
GGSSGGSSGGSSGGSSGGSSGGSSGGSSGGSSGGSSGGSSGGSSGGSSGGS

SEQ ID NO: 386 - protein, 47 aa, synthetic construct
  REGION 1..47: note = Description of Artificial Sequence: Synthetic polypeptide
GGSSGGSSGGSSGGSSGGSSGGSSGGSSGGSSGGSSGGSSGGSSGGS

SEQ ID NO: 387 - protein, 43 aa, synthetic construct
  REGION 1..43: note = Description of Artificial Sequence: Synthetic polypeptide
GGSSGGSSGGSSGGSSGGSSGGSSGGSSGGSSGGSSGGSSGGS

SEQ ID NO: 388 - protein, 39 aa, synthetic construct
  REGION 1..39: note = Description of Artificial Sequence: Synthetic polypeptide
GGSSGGSSGGSSGGSSGGSSGGSSGGSSGGSSGGSSGGS

SEQ ID NO: 389 - protein, 35 aa, synthetic construct
  REGION 1..35: note = Description of Artificial Sequence: Synthetic polypeptide
GGSSGGSSGGSSGGSSGGSSGGSSGGSSGGSSGGS

SEQ ID NO: 390 - protein, 31 aa, synthetic construct
  REGION 1..31: note = Description of Artificial Sequence: Synthetic polypeptide
GGSSGGSSGGSSGGSSGGSSGGSSGGSSGGS

SEQ ID NO: 391 - protein, 27 aa, synthetic construct
  REGION 1..27: note = Description of Artificial Sequence: Synthetic peptide
GGSSGGSSGGSSGGSSGGSSGGSSGGS

SEQ ID NO: 392 - protein, 23 aa, synthetic construct
  REGION 1..23: note = Description of Artificial Sequence: Synthetic peptide
GGSSGGSSGGSSGGSSGGSSGGS

SEQ ID NO: 393 - protein, 19 aa, synthetic construct
  REGION 1..19: note = Description of Artificial Sequence: Synthetic peptide
GGSSGGSSGGSSGGSSGGS

SEQ ID NO: 394 - protein, 15 aa, synthetic construct
  REGION 1..15: note = Description of Artificial Sequence: Synthetic peptide
GGSSGGSSGGSSGGS

SEQ ID NO: 395 - protein, 11 aa, synthetic construct
  REGION 1..11: note = Description of Artificial Sequence: Synthetic peptide
GGSSGGSSGGS

SEQ ID NO: 396 - protein, 7 aa, synthetic construct
  REGION 1..7: note = Description of Artificial Sequence: Synthetic peptide
GGSSGGS

SEQ ID NO: 397 - protein, 56 aa, synthetic construct
  REGION 1..56: note = Description of Artificial Sequence: Synthetic polypeptide
GGSEAAAKEAAAKEAAAKEAAAKEAAAKEAAAKEAAAKEAAAKEAAAKEAAAKGGS

SEQ ID NO: 398 - protein, 51 aa, synthetic construct
  REGION 1..51: note = Description of Artificial Sequence: Synthetic polypeptide
GGSEAAAKEAAAKEAAAKEAAAKEAAAKEAAAKEAAAKEAAAKEAAAKGGS

SEQ ID NO: 399 - protein, 46 aa, synthetic construct
  REGION 1..46: note = Description of Artificial Sequence: Synthetic polypeptide
GGSEAAAKEAAAKEAAAKEAAAKEAAAKEAAAKEAAAKEAAAKGGS

SEQ ID NO: 400 - protein, 41 aa, synthetic construct
  REGION 1..41: note = Description of Artificial Sequence: Synthetic polypeptide
GGSEAAAKEAAAKEAAAKEAAAKEAAAKEAAAKEAAAKGGS

SEQ ID NO: 401 - protein, 36 aa, synthetic construct
  REGION 1..36: note = Description of Artificial Sequence: Synthetic polypeptide
GGSEAAAKEAAAKEAAAKEAAAKEAAAKEAAAKGGS

SEQ ID NO: 402 - protein, 31 aa, synthetic construct
  REGION 1..31: note = Description of Artificial Sequence: Synthetic polypeptide
GGSEAAAKEAAAKEAAAKEAAAKEAAAKGGS

SEQ ID NO: 403 - protein, 26 aa, synthetic construct
  REGION 1..26: note = Description of Artificial Sequence: Synthetic peptide
GGSEAAAKEAAAKEAAAKEAAAKGGS

SEQ ID NO: 404 - protein, 21 aa, synthetic construct
  REGION 1..21: note = Description of Artificial Sequence: Synthetic peptide
GGSEAAAKEAAAKEAAAKGGS

SEQ ID NO: 405 - protein, 16 aa, synthetic construct
  REGION 1..16: note = Description of Artificial Sequence: Synthetic peptide
GGSEAAAKEAAAKGGS

SEQ ID NO: 406 - protein, 11 aa, synthetic construct
  REGION 1..11: note = Description of Artificial Sequence: Synthetic peptide
GGSEAAAKGGS

SEQ ID NO: 407 - protein, 88 aa, synthetic construct
  REGION 1..88: note = Description of Artificial Sequence: Synthetic polypeptide
GGSSSGSETPGTSESATPESSGSETPGTSESATPESSGSETPGTSESATPESSGSETPGTSESATPESSGSETPGTSESATPESGGSS

SEQ ID NO: 408 - protein, 72 aa, synthetic construct
  REGION 1..72: note = Description of Artificial Sequence: Synthetic polypeptide
GGSSSGSETPGTSESATPESSGSETPGTSESATPESSGSETPGTSESATPESSGSETPGTSESATPESGGSS

SEQ ID NO: 409 - protein, 56 aa, synthetic construct
  REGION 1..56: note = Description of Artificial Sequence: Synthetic polypeptide
GGSSSGSETPGTSESATPESSGSETPGTSESATPESSGSETPGTSESATPESGGSS

SEQ ID NO: 410 - protein, 40 aa, synthetic construct
  REGION 1..40: note = Description of Artificial Sequence: Synthetic polypeptide
GGSSSGSETPGTSESATPESSGSETPGTSESATPESGGSS

SEQ ID NO: 411 - protein, 24 aa, synthetic construct
  REGION 1..24: note = Description of Artificial Sequence: Synthetic peptide
GGSSSGSETPGTSESATPESGGSS

SEQ ID NO: 412 - RNA, 2196 nt, synthetic construct
  misc_feature 1..2196: note = Description of Artificial Sequence: Synthetic polynucleotide
  source 1..2196: mol_type = other RNA
agcggcggctcatctggcggcagcagcggctccgagacccctggcaccagcgagagcgccacccccgagagcagcggcggcagctccgggggctctagcaccctgaacatcgaggacgagtaccggctgcacgagaccagcaaggagcctgacgtgagcctgggcagcacctggctgtccgactttcctcaggcctgggccgaaaccggcggcatgggcctggccgtgcggcaggccccactgatcatccctctgaaggccaccagcacccccgtgagcatcaagcagtaccccatgagccaggaggccaggctgggcatcaagccccacatccagaggctgctggatcagggaatcctggtgccttgtcagagcccttggaacacccctctgctgcctgtgaagaaaccaggaaccaacgactacagaccagtgcaggacctgagggaggtgaataagagagtggaggacatccaccccaccgtgcccaacccctacaacctgctgtcaggcctgcccccctcccaccagtggtacaccgtgctggacctgaaggacgcctttttctgcctgagactgcaccccactagccagcccctgttcgccttcgagtggagggacccagagatgggcatcagcggccagctgacctggacaagactgccacagggcttcaagaacagccctaccctgttcaacgaggccctgcaccgggacctggccgacttcagaatccagcaccccgacctgatcctgctgcagtacgtggacgacctgctgctggccgccaccagcgagctggactgccagcagggcaccagagccctgctgcagaccctgggcaacctgggctacagggccagcgccaagaaggcccagatctgccagaagcaggtgaagtacctgggctatctgctgaaggagggccagaggtggctgaccgaggccaggaaggagaccgtgatgggccagcctacccctaagaccccccggcagctgcgggagttcctgggcaaggccggcttctgccggctgttcatccccggcttcgccgagatggccgccccactgtatccactgaccaagcccggcaccctgtttaattggggccccgaccagcagaaggcctaccaggagatcaagcaggccctgctgaccgcccctgccctgggcctgcccgacctgaccaagcccttcgagctgttcgtggacgagaagcagggctacgccaagggcgtgctgacccagaagctgggcccctggcggcggcccgtggcctacctgagcaagaagctggacccagtggccgccggctggcctccatgcctgagaatggtggccgccatcgccgtgctgaccaaggatgccggcaagctgaccatgggccagcctctggtgatcctggccccccacgccgtggaggccctggtgaagcagccacccgataggtggctgtctaacgccaggatgacccattaccaggccctgctgctggacaccgacagagtgcagttcggccccgtggtggccctgaatcccgccacactgctgcccctgcccgaggagggcctgcagcacaactgcctggacatcctggccgaggcccacggcacccggcccgacctgacagaccagccactgcccgacgccgaccacacctggtacaccgacggcagctccctgctgcaggagggccagcgcaaggccggcgccgccgtgaccaccgagaccgaggtgatctgggccaaggccctgcccgccggcacctccgctcagagggccgagctgatcgccctgacccaggccctgaagatggccgagggcaagaagctgaacgtgtacaccgacagcagatacgccttcgccaccgcccacatccacggcgagatctacagaaggagaggctggctgacctccgaaggcaaagagatcaagaacaaggacgagatcctggccctgctgaaggccctgttcctgcctaagcggctgtctatcatccactgtcctggccaccagaagggccactccgccgaggcccggggcaacaggatggccgaccaggccgccaggaaggccgctattaccgagacccctgacacctccaccctgctgatcgagaactccagccccagcggcggctccaagaggaccgccgatggctccgagttcgagccaaagaagaagaggaaggtgtga

SEQ ID NO: 413 - RNA, 2196 nt, synthetic construct
  misc_feature 1..2196: note = Description of Artificial Sequence: Synthetic polynucleotide
  source 1..2196: mol_type = other RNA
tccgggggaagcagcggcggcagcagcggctcagagacccccggcacatccgagagcgccacccccgagagcagcggcggcagctccggcggcagcagcaccctgaatatcgaggacgagtacagactgcacgagacaagcaaggaacccgacgtgtctctgggcagcacctggctgtccgacttcccccaggcctgggccgagaccggcggcatgggcctggccgtgcggcaggcccccctgatcatccccctgaaggccaccagcacccccgtgtccatcaaacagtaccctatgtcccaggaggccagactgggcatcaagccccacatccagcggctgctggaccagggcatcctggtgccctgccagagcccttggaacacccctctgctgcccgtgaagaagcctggcaccaacgactacaggcccgtgcaggacctgcgggaggtgaacaagagagtggaggacatccaccccaccgtgcccaacccctacaacctgctgagcggcctgcctccaagccaccagtggtacacagtgctggacctgaaagacgctttcttctgcctgaggctgcacccaacaagccagcccctgttcgccttcgagtggagggaccccgagatgggcatcagcggccagctgacctggacccggctgcctcagggcttcaagaactcccccaccctgtttaacgaggccctgcacagggacctggccgacttccgcatccagcatcccgacctgatcctgctgcagtacgtggacgacctgctgctggccgccaccagcgagctggactgtcagcagggcaccagagccctgctgcagaccctgggcaacctgggctacagggcctccgccaagaaggcccagatctgccagaagcaggtgaagtacctgggctacctgctgaaggagggccagcgctggctgaccgaggccagaaaggagaccgtgatgggccagcctaccccaaagacccccagacagctgcgcgagttcctgggcaaggccggcttctgtcggctgttcatccccggcttcgccgagatggccgcccccctgtacccactgaccaaacccggcaccctgttcaactggggccccgatcagcagaaggcctaccaggagatcaagcaggccctgctgaccgcccccgcactgggcctgccagacctgaccaagccctttgagctgttcgtggacgagaagcagggctacgccaagggcgtgctgacccagaagctgggcccttggcggaggcccgtggcctacctgagcaagaagctggaccccgtggccgccggctggcccccctgcctgcggatggtggccgccatcgccgtgctgaccaaggacgccggcaagctgaccatgggccagcctctggtgatcctggcccctcacgccgtggaggccctggtgaagcagcccccagacaggtggctgtctaatgccaggatgacacactaccaggccctgctgctggataccgacagggtgcagttcggccccgtggtggccctgaacccagccaccctgctgcctctgcccgaggaggggctgcagcacaactgtctggacatcctggccgaagcccacggcaccagacctgacctgaccgaccagccactgcctgacgccgaccacacctggtacaccgacggctccagcctgctgcaggagggccagagaaaggccggggccgccgtgacaaccgagaccgaggtgatctgggccaaggccctgcccgccggcacctccgcccagagagccgagctcatcgccctgacccaggccctgaagatggccgagggcaagaagctgaatgtgtacaccgacagcaggtacgccttcgccaccgcccacatccacggcgagatctacaggaggaggggctggctgacaagcgagggcaaggagatcaagaacaaggatgagatcctggccctgctgaaggccctgttcctgcccaagcggctgtccatcatccactgccctggccaccagaaggggcatagcgccgaggcccgcggcaaccgcatggccgaccaggccgccaggaaggcagccatcacagagaccccagacaccagcaccctgctgatcgagaacagcagcccctctggcggctccaagaggaccgccgacggcagcgagttcgagcccaagaagaagcggaaggtgtga

SEQ ID NO: 414 - RNA, 2196 nt, synthetic construct
  misc_feature 1..2196: note = Description of Artificial Sequence: Synthetic polynucleotide
  source 1..2196: mol_type = other RNA
agcggcggcagctccggcggcagctccggctccgagacccccggcaccagcgagagcgccacccccgagagctctggcggctccagcggcggcagcagcaccctgaacatcgaggacgagtacaggctgcacgagaccagcaaggagccagacgtgtccctgggctcaacctggctgtccgacttcccacaggcctgggccgagaccggcgggatgggcctggccgtgcgccaggcccctctgatcatccctctgaaagccacatctacccctgtgtccatcaagcagtacccaatgtcacaggaggcccggctgggcatcaagccacacatccagcggctgctggaccagggcatcctggtgccctgccagagcccctggaacacccctctgctgcccgtgaagaaacctggcaccaacgactacagacccgtgcaggacctgcgcgaggtgaataagagggtggaggacatccacccaaccgtgcccaacccctacaacctgctgtccggcctgccaccaagccaccagtggtataccgtgctggacctgaaggacgccttcttttgcctgaggctgcaccctacctctcagcctctgttcgccttcgagtggcgggacccagagatgggcatcagcggccagctgacatggacccggctgccacagggcttcaagaacagcccaaccctgttcaacgaggccctgcacagggacctggccgacttccggatccagcaccccgacctgatcctgctgcagtacgtggacgacctgctgctggccgccaccagcgagctggactgccagcagggcacccgcgccctgctgcagaccctgggcaacctgggctaccgggccagcgccaagaaggcccagatctgtcagaagcaggtgaagtacctgggctacctgctgaaggagggccagaggtggctgaccgaggccaggaaggagaccgtgatgggccagcctaccccaaagacccccaggcagctgcgggagttcctggggaaggccggcttttgcaggctgttcatcccaggctttgccgagatggccgcccctctgtaccccctgactaagcctggcaccctgttcaactggggccccgatcagcagaaggcctaccaggagatcaagcaggccctgctgaccgcccctgccctgggcctgcccgacctgaccaagcccttcgagctgttcgtggatgaaaagcagggctacgccaagggcgtgctgacccagaagctgggcccctggaggagacctgtggcctacctgtccaaaaagctggaccccgtggccgccggctggcccccctgcctgcggatggtggccgccatcgccgtgctgaccaaggacgccggcaagctgaccatgggccagcctctggtgattctggccccccacgccgtggaggccctggtgaagcagccccccgacagatggctgtccaacgccagaatgacccactaccaggccctgctgctggacaccgaccgcgtgcagttcggccccgtggtggccctgaaccccgccaccctgctgcccctgcccgaggaaggcctgcagcacaactgcctggacatcctggccgaggcccacggcaccaggccagacctgaccgaccagcccctgcccgacgccgaccacacctggtacaccgatgggtccagcctgctgcaggagggccagaggaaggccggcgccgccgtgaccacagagaccgaggtgatctgggccaaggccctgccagccggcaccagcgcccagagggccgagctgatcgccctgacccaggccctgaagatggccgagggcaagaagctgaatgtgtacaccgacagcagatacgccttcgccaccgcccacatccacggcgagatctacaggagaaggggctggctgactagcgagggcaaggagattaagaacaaagacgagatcctggccctgctgaaggccctgttcctgcccaagaggctgtctattatccattgcccaggccaccagaagggccactccgccgaagccaggggcaacagaatggccgaccaggccgccaggaaagccgccatcaccgagacccccgacacctctaccctgctgatcgagaacagctcccccagcggcggcagcaagaggaccgccgacggctccgagttcgagcccaagaagaagaggaaggtgtga

SEQ ID NO: 415 - RNA, 2196 nt, synthetic construct
  misc_feature 1..2196: note = Description of Artificial Sequence: Synthetic polynucleotide
  source 1..2196: mol_type = other RNA
agcggcggctcctccggcggcagcagcgggtccgagacccccggcaccagcgagagcgccacccccgagagctccggcggcagttccggcggctccagcaccctgaacatcgaggacgagtacaggctgcacgagaccagcaaggagcccgacgtgtccctgggcagtacctggctgagcgactttccccaggcctgggccgagacaggcggcatgggcctggccgtgcggcaggcccccctgatcatcccactgaaagccaccagcaccccagtgtccatcaagcagtatcctatgtcccaggaggcccgcctgggcatcaagcctcacatccagaggctgctggatcagggcatcctggtgccttgccagtcaccctggaacacccccctgctgcccgtgaagaagcctggcaccaacgattacagaccagtgcaggacctgcgggaggtgaacaagagggtggaggatatccaccccaccgtgcccaacccctacaacctgctgtccggcctgcccccctcccaccagtggtacactgtgctggacctgaaggacgccttcttttgcctgcggctgcaccccacctctcagcccctgttcgccttcgagtggagagatcccgagatgggcatcagcggccagctgacctggaccaggctgccccagggcttcaagaacagccccaccctgttcaacgaggccctgcaccgggacctggccgacttccgcatccagcaccccgacctgatcctgctgcagtacgtggacgacctgctgctggccgccaccagcgagctggattgccagcagggcaccagggccctgctgcagaccctgggcaacctgggctaccgggccagcgccaagaaggcccagatttgccagaagcaggtgaagtacctgggctacctgctgaaggagggccagcgctggctgaccgaggcccggaaggagaccgtgatgggccagcccacccccaagacccccagacagctgagggagtttctgggcaaggccggcttctgtagactgttcatccccggcttcgccgagatggccgcccccctgtaccctctgaccaagcccggcacactgttcaactggggcccagaccagcagaaggcctaccaggagattaagcaggccctgctgactgccccagccctgggcctgcccgacctgaccaagccttttgagctgttcgtggacgagaagcagggctacgccaagggcgtgctgacccagaagctggggccttggcggcgccccgtggcctacctgtccaagaagctggaccccgtggccgccggatggcccccctgcctgagaatggtggccgccatcgccgtgctgaccaaggacgccgggaagctgaccatgggccagcccctggtgatcctggccccccacgccgtggaggccctggtgaagcagccccccgacagatggctgagcaacgcccgcatgacccactaccaggccctgctgctggacaccgacagggtgcagttcggccctgtggtggctctcaaccccgccaccctgctgcctctgcccgaggagggcctgcagcacaactgcctggacattctggccgaggcccacggcaccagacccgacctgaccgaccagcccctgcctgacgccgaccacacctggtacaccgacggctccagcctgctgcaggagggccagaggaaggccggcgccgccgtgaccaccgagaccgaggtgatctgggccaaggccctgcccgccggcaccagcgcccagagagccgaactgatcgccctgacccaggccctgaagatggccgagggcaagaagctgaacgtgtataccgacagcaggtacgccttcgccacagcccacatccacggcgagatctacaggaggaggggctggctgacctccgagggcaaggagatcaaaaacaaggacgagatcctggccctgctgaaggccctgttcctgccaaaaagactgtctatcatccactgccctggccaccagaagggccacagcgccgaggccaggggcaacagaatggccgaccaggccgccagaaaggccgccatcaccgagacccccgacaccagcaccctcctgatcgagaacagctctccaagcggaggcagcaagagaacagccgatggcagcgagttcgaacccaagaagaagagaaaggtgtga

SEQ ID NO: 416 - RNA, 2196 nt, synthetic construct
  misc_feature 1..2196: note = Description of Artificial Sequence: Synthetic polynucleotide
  source 1..2196: mol_type = other RNA
agcgggggctctagcggcggcagcagcgggtctgagacccctgggaccagcgagtccgccacccccgagtcctctggcggcagctccggcggctccagcaccctgaatatcgaggacgagtacagactgcacgagaccagcaaggagcccgatgtgagcctggggtccacctggctgtctgacttccctcaggcctgggccgagaccggcggcatgggcctggccgtgcgccaggcccccctgatcatccctctgaaggccaccagcacacccgtgagcatcaagcagtaccccatgtcccaggaggccagactgggcatcaagcctcacatccagcgcctgctggaccagggcatcctggtgccctgccagtccccatggaacaccccactgctgcccgtgaagaagcccggcacaaacgattacagacccgtgcaggacctgcgcgaggtgaacaagcgggtggaggacatccaccccaccgtgcccaacccctacaacctgctgtctggcctgccaccctcccaccagtggtacaccgtgctggatctgaaggacgccttcttctgcctgcggctgcaccctaccagccagcccctgttcgcctttgagtggcgggatcccgagatgggcatctccggccagctgacctggacccggctgccccagggcttcaagaacagccccaccctgtttaacgaggccctgcacagagacctggccgacttcagaatccagcaccctgatctgatcctgctgcagtacgtggacgacctgctgctggccgccaccagcgagctggattgccagcagggcacccgggccctgctgcagaccctgggcaacctgggctacagagccagcgccaagaaggcccagatctgccagaagcaggtgaagtacctgggctacctgctgaaggagggccagaggtggctgaccgaggccagaaaggagaccgtgatgggccagcccacccccaagacccctaggcagctgcgggagttcctgggcaaggccgggttctgcagactgttcattcccggctttgccgagatggccgcccccctgtaccccctgaccaagcccggcaccctgttcaactggggccccgatcagcagaaggcctaccaggagatcaagcaggccctgctgaccgcccccgccctgggcctgcccgacctgaccaagcccttcgagctgttcgtggacgagaagcagggctacgccaagggcgtgctgacccagaagctgggcccctggagaaggcctgtggcctacctgagcaagaagctggatcctgtggccgccggctggcctccttgcctgcgcatggtggccgccatcgccgtgctgaccaaggacgccggcaagctgacaatgggccagcccctggtgattctggccccccacgccgtggaggccctggtgaagcagccccccgacagatggctgtccaacgcccgcatgacccactaccaggccctgctgctggacaccgaccgggtgcagttcggccccgtggtggccctgaacccagccaccctgctgcccctgcccgaggagggcctgcagcacaattgcctggacatcctcgccgaggcccatggcaccaggccagacctgaccgaccagcccctgcctgacgccgaccacacctggtacaccgacggcagctctctgctgcaggagggccagaggaaggctggcgccgccgtgaccaccgagaccgaggtgatctgggccaaggccctgccagccggcaccagcgcccagagagccgagctgatcgccctgacccaggccctgaagatggccgagggcaagaagctgaacgtgtacaccgacagccggtacgccttcgccaccgcccacatccacggcgagatctacagaaggagaggctggctgacctctgagggcaaggagatcaagaataaggacgagatcctggccctgctgaaggccctgttcctgcccaagcgcctgtccatcatccactgtccaggccaccagaagggccatagcgccgaggccagaggcaacagaatggccgaccaggccgccagaaaggccgccatcaccgagacccctgacaccagcaccctgctgatcgagaattccagcccctccggcggctccaagaggaccgccgacggcagcgagtttgagccaaaaaagaagaggaaggtgtga

SEQ ID NO: 417 - RNA, 2196 nt, synthetic construct
  misc_feature 1..2196: note = Description of Artificial Sequence: Synthetic polynucleotide
  source 1..2196: mol_type = other RNA
agcggcggctccagcggcggctccagcggatccgagacccccggcaccagcgagtccgccacccccgagagcagcgggggcagcagcggcggcagctccaccctgaacatcgaggacgagtacaggctgcacgagaccagcaaggagcccgacgtgtctctgggcagcacctggctgtccgacttcccccaggcctgggccgagaccggcggcatgggcctggccgtgagacaggcccccctgatcatccctctgaaggccaccagcacccccgtgtctatcaagcagtaccccatgtctcaggaggccagactgggcatcaagccccatatccagcggctgctggaccagggcatcctggtgccctgccagagcccatggaacacccccctgctgcccgtgaagaagcccggcaccaacgattaccggcccgtgcaggatctgcgcgaggtgaataagagagtggaggacatccaccctacagtgcccaatccttacaacctgctgagcggcctgccccccagccaccagtggtacaccgtgctggacctgaaggacgccttcttctgcctgaggctgcaccctaccagccagccactgtttgccttcgaatggagggaccccgagatgggcatcagcggccagctgacctggaccaggctgccccagggcttcaagaacagccctactctgttcaacgaggccctgcacagggacctggccgactttagaatccagcacccagacctgatcctcctgcagtacgtggacgacctgctgctggccgccaccagcgagctggactgtcagcagggcaccagggccctgctgcagaccctgggcaatctgggctacagggcctccgccaagaaggcccagatctgccagaagcaggtgaagtacctgggctacctgctgaaggagggccagcggtggctgaccgaggcccgcaaggagaccgtgatgggccagcccacccccaagacccccaggcagctgcgggagttcctgggcaaggccggcttctgccggctgttcatccctggcttcgccgagatggccgctcccctgtaccctctgaccaagcctggcaccctgttcaattggggccccgaccagcagaaggcctaccaggagatcaagcaggccctgctgacagccccagccctgggcctgcccgacctgaccaagccattcgagctgttcgtggacgagaagcagggctacgccaagggcgtgctgacccagaagctgggcccctggagacggcctgtggcctacctgtccaagaagctggaccccgtggccgccggctggcccccctgcctgcggatggtggccgccattgccgtgctgaccaaagatgccgggaagctgaccatgggccagcccctggtgatcctggcccctcatgccgtggaggccctggtcaagcagcctcccgatagatggctgtccaacgcccggatgacccactaccaggccctgctgctggacaccgatcgcgtgcagttcggccccgtggtggccctgaaccccgccaccctgctgcccctgccagaggagggcctgcagcacaactgcctggacatcctggccgaggcccacggcaccaggcccgacctgaccgaccagcccctgcccgacgccgatcacacttggtacacagacggcagctctctgctgcaggagggacagagaaaggccggcgccgccgtgaccaccgagaccgaggtgatctgggccaaggccctgcccgccggcaccagcgcccagagggccgagctgatcgccctgacccaggccctgaagatggccgagggcaagaagctgaacgtgtacaccgacagcagatacgccttcgccacagcccatatccacggagaaatctacaggcggaggggctggctgaccagcgagggcaaggagatcaagaacaaggacgagatcctggccttgctgaaggccctgttcctgcccaagcgcctgtccatcatccactgccccggccaccagaagggccactccgccgaggccaggggcaaccggatggccgaccaggccgccagaaaggccgccatcaccgagacccccgacacctccaccctgctgatcgagaacagcagccctagcggcggctccaagcgcacagccgacggctccgagttcgagcccaagaagaagcggaaggtgtga

SEQ ID NO: 418 - RNA, 2196 nt, synthetic construct
  misc_feature 1..2196: note = Description of Artificial Sequence: Synthetic polynucleotide
  source 1..2196: mol_type = other RNA
tccggcggctcttccggcggcagcagcggcagcgagaccccaggcactagcgagagcgccaccccagagagctccggcggcagcagcggcggctcctctaccctgaacatcgaggacgagtacagactgcacgagaccagcaaggagcctgacgtgagcctgggcagcacctggctgtccgacttccctcaggcctgggccgagaccggcgggatgggcctggccgtgcggcaggcccccctgatcatccccctgaaggccacctccacccccgtgtccatcaagcagtaccccatgagccaggaggccaggctggggatcaagcctcacattcagagactgctggaccagggcatcctggtgccttgtcagagcccctggaacactcccctgctgccagtcaagaagcccggcaccaacgactacagacccgtgcaggatctgcgggaggtgaataagagggtggaggacatccacccaaccgtgcccaacccctacaacctgctgtccggcctgcctcccagccaccagtggtacaccgtgctggatctgaaggacgccttcttctgcctgcggctgcaccccacctcccagcccctgttcgccttcgagtggcgagaccccgaaatgggcatctccggccagctgacctggaccaggctgccccagggcttcaagaacagccccaccctgtttaacgaggccctgcaccgggatctggccgacttcagaatccagcaccctgacctgatcctgctgcagtatgtggacgacctgctgctggccgccacctccgagctggactgccagcagggcaccagggccctgctgcagaccctgggcaatctgggctaccgggccagcgccaagaaggcccagatctgccagaagcaggtgaagtacctgggctacctgctgaaggagggacagcggtggctgaccgaggcccggaaggagaccgtgatgggccagcctacccccaagacccccaggcagctgcgggagttcctgggcaaggccggcttctgcaggctgttcatccccggcttcgccgagatggccgcccccctgtacccactgacaaagcccggcaccctgttcaactggggccccgaccagcagaaggcctaccaggagatcaagcaggccctgctgaccgcccccgccctgggcctgcccgacctgaccaaaccattcgagctgttcgtggacgagaagcagggctacgctaagggcgtgctgacccagaagctgggcccatggagacggcctgtggcctacctgagcaagaagctggaccctgtggccgccggctggcctccatgcctgcgcatggtggccgccatcgccgtgctgacgaaggacgccggcaagctgaccatgggccagcccctggtgatcctggcccctcacgccgtggaggctctggtgaagcagccccccgaccggtggctgtccaacgccaggatgacccactaccaggccctgctgctggacaccgacagggtgcagttcggccccgtggtggccctgaaccccgccaccctgctgcctctgcccgaggagggcctgcagcacaactgtctggatatcctggccgaggctcacggcaccaggccagacctgaccgaccagcccctgcccgacgccgaccacacctggtacaccgacgggagctccctgctgcaggagggccagcgcaaggccggagccgccgtgaccaccgagacagaggtgatttgggccaaggccctgcccgccggcaccagcgcccagagggccgagctgatcgccctgacccaggccctgaagatggccgagggaaagaagctgaacgtgtacaccgacagcagatacgccttcgccaccgcccacatccacggggagatctacaggaggcggggctggctgaccagcgagggcaaggagatcaagaacaaggacgagatcctggccctgctgaaggccctgttcctgcccaagaggctgtctatcatccactgtcctggccaccagaagggccacagcgccgaggccagaggcaacaggatggccgaccaggccgccaggaaggccgccatcaccgagacccccgacaccagcaccctgctgatcgagaacagcagccccagcggcggcagcaagaggaccgccgacggcagcgagttcgagcctaagaagaagaggaaggtgtga

SEQ ID NO: 419 - RNA, 2196 nt, synthetic construct
  misc_feature 1..2196: note = Description of Artificial Sequence: Synthetic polynucleotide
  source 1..2196: mol_type = other RNA
tccggaggcagcagcggcggcagcagcggcagcgagaccccaggcaccagcgagagcgccaccccagagtccagcggaggctctagcggcggcagctccaccctgaacatcgaggacgagtacagactgcacgagacttccaaggagcccgatgtgtccctgggcagcacctggctgagcgattttcctcaggcctgggccgagaccggcgggatggggctggccgtgcgccaggcccccctgatcatcccactgaaggccaccagcacccccgtgagcatcaagcagtacccaatgtctcaggaggcccgcctgggcatcaagccccacatccagagactgctggaccagggcatcctggtgccctgccagagcccctggaacacccccctgctgcccgtgaagaagcctggcaccaacgactacaggccagtgcaggacctgcgcgaggtgaacaagagggtggaggacatccaccccaccgtgcccaatccatacaacctgctgagcggcctgccccccagccaccagtggtacaccgtgctggacctgaaggacgccttcttctgcctgaggctgcaccccacctcccagcctctgttcgccttcgagtggagggatcccgagatgggcatctccggccagctgacctggacccggctgccccagggcttcaagaactctcctaccctgttcaacgaggccctgcatcgggacctggccgacttcaggatccagcaccccgacctgatcctgctgcagtacgtggacgatctgctgctggccgccacctccgagctggactgccagcagggcaccagggccctgctgcagaccctgggcaacctggggtatcgcgccagcgccaagaaggctcagatctgccagaagcaggtgaaatacctgggctacctgctgaaggagggccagcgctggctgacagaggccagaaaggagaccgtgatgggccagcccaccccaaagacccccagacagctgagagagttcctgggcaaggccggcttctgcaggctgttcatccccggcttcgccgagatggccgcccccctgtaccccctgaccaagccagggaccctgttcaactggggccccgaccagcagaaggcctaccaggagatcaagcaggccctgctgaccgcccccgccctgggcctgcccgacctgaccaagcccttcgagctgttcgtggacgagaagcagggctacgccaagggcgtgctcacccagaagctgggcccttggagaaggccagtggcctacctgtccaagaaactggacccagtggccgccggctggcccccctgcctgagaatggtggccgccatcgccgtgctgaccaaggacgccggcaaactgaccatgggccagcccctggtgattctggccccccacgccgtggaggccctggtgaagcagccccccgatcggtggctgagcaacgccagaatgacccactaccaggccctgctgctggacaccgatagagtgcagttcggcccagtggtggccctgaaccccgccaccctgctgcccctgcccgaggagggcctgcagcacaactgcctggatatcctggccgaggcccacggcacccggcccgacctgaccgaccagcccctgcccgacgccgaccacacctggtacacagacggcagcagcctgctgcaggaggggcagagaaaggccggcgccgccgtgaccaccgagaccgaggtgatctgggccaaggccctgcccgccggcaccagcgcccagagagccgagctgattgccctgacccaggccctgaagatggccgagggcaagaagctgaatgtgtataccgacagcagatacgccttcgccaccgcccacatccacggcgagatctacagacggaggggctggctgacctctgaaggcaaggagatcaagaacaaggacgagatcctggccctgctgaaagccctgttcctgcccaagaggctgtccatcatccactgccccggccaccagaagggccactccgccgaggcccggggcaatcggatggccgaccaggccgccagaaaggccgccatcaccgaaaccccagacaccagcaccctgctgatcgagaacagcagccccagcggcggcagcaagaggaccgccgacggcagcgagttcgagcccaagaagaagaggaaggtgtga

SEQ ID NO: 420 - RNA, 2196 nt, synthetic construct
  misc_feature 1..2196: note = Description of Artificial Sequence: Synthetic polynucleotide
  source 1..2196: mol_type = other RNA
agcggcggctccagcggcggcagcagcgggtccgagacccctggcacctccgagtccgccacccccgagagctccggaggcagcagcggcggctccagcaccctgaatatcgaggacgagtaccgcctgcacgagaccagcaaggagcccgatgtgtccctgggcagcacctggctgtccgactttccacaggcctgggccgagaccggcggcatgggcctggccgtgaggcaggcccccctgatcatccccctgaaggccaccagcacccctgtgagcatcaagcagtaccctatgtctcaggaggccaggctgggcatcaagccccacatccagagactgctggatcagggcatcctggtgccctgccagagcccatggaacacccccctgctgccagtgaagaagcctggcacaaacgactacaggccagtgcaggacctgcgcgaggtgaacaagagggtggaggacatccaccccaccgtgcccaacccctacaacctgctgtccggcctgcccccttctcaccagtggtacaccgtgctggacctgaaggatgccttcttctgcctgcgcctgcaccctaccagccagcccctgttcgccttcgagtggagagaccccgagatgggcatcagcggccagctgacctggactagactgccccagggattcaagaacagcccaaccctgttcaacgaggccctgcaccgcgacctggccgattttaggatccagcaccccgatctgatcctgctgcagtacgtggacgatctgctgctggccgccacctccgagctggattgccagcagggcaccagggccctgctgcagaccctgggcaacctgggctacagagcctccgccaagaaggcccagatttgccagaagcaggtgaagtacctgggctacctgctgaaggagggccagagatggctgaccgaggccaggaaggaaaccgtgatgggccagcctacacccaagacccccagacagctgcgggagtttctgggcaaggccggcttttgccggctgttcatccccggcttcgccgagatggccgcccccctgtaccccctgaccaagcctggcaccctgttcaactggggccccgaccagcagaaggcctaccaggagatcaagcaggccctgctgaccgcccccgccctggggctgcccgacctgaccaaaccattcgagctgttcgtggacgagaagcaggggtacgccaagggcgtgctgacccagaagctgggcccctggaggagaccagtggcctacctgagcaagaagctggaccccgtggccgccggctggcctccctgtctgagaatggtggctgccatcgccgtgctgaccaaggacgccggcaagctgaccatgggccagcccctggtgatcctggccccccacgccgtggaggccctggtgaagcagcccccagacagatggctgagcaacgccaggatgacccactaccaggccctgctgctggacaccgacagggtgcagttcggccccgtggtggccctgaaccccgccaccctgctgcccctgcccgaggagggcctgcagcacaactgcctggacatcctggctgaggcccacggcacccggcctgacctgaccgaccagcccctgcccgacgccgaccacacctggtacaccgatggatcctccctgctgcaggagggccagcggaaggccggcgccgccgtgacaaccgagaccgaggtgatctgggccaaagccctgcccgccggcaccagcgcccagcgggccgaactgatcgccctgacccaggccctgaagatggccgagggcaaaaagctgaatgtgtacaccgacagccggtatgccttcgccaccgcccacatccacggcgagatctacaggcggcggggctggctgacctccgagggcaaggagatcaagaacaaggacgagatcctggccctgctgaaggccctgttcctgcctaagaggctgtctatcatccactgccccggccaccagaagggccacagcgccgaggccagaggcaaccggatggccgaccaggccgccaggaaggccgccatcaccgagacccccgacaccagcaccctgctgatcgagaacagcagccccagcggcggctcaaagagaacagccgacggcagcgagttcgagccaaagaagaagcggaaggtgtga

SEQ ID NO: 421 - RNA, 2196 nt, synthetic construct
  misc_feature 1..2196: note = Description of Artificial Sequence: Synthetic polynucleotide
  source 1..2196: mol_type = other RNA
tccggcggcagcagcggaggcagcagcggctccgagacccccggcacctccgagagcgccacccccgagtccagcggcggcagctccggcggcagctccacactgaatatcgaggacgagtaccgcctgcacgagaccagcaaggagcccgacgtgtccctgggctccacctggctgagcgacttcccccaggcctgggccgagaccggcggcatgggcctggccgtgagacaggcccctctgatcatccccctgaaggccacctccacccccgtgagcatcaagcagtacccaatgtcccaggaggccaggctgggcatcaagccccacatccagcggctgctggatcagggcatcctggtgccctgtcagagcccctggaacacccccctgctgccagtgaagaagcccggcaccaacgactatcggcctgtgcaggacctgcgggaggtgaacaaacgggtggaggacatccaccccaccgtgcctaacccatacaacctgctgtccggcctgcccccaagccaccagtggtacaccgtgctggacctgaaggacgccttcttctgcctgcggctgcaccccaccagccagcccctgttcgccttcgagtggagggaccccgagatgggcatctccggccagctgacctggaccaggctgccccagggcttcaagaacagccccaccctgttcaacgaggccctgcaccgcgacctggccgattttagaatccagcaccctgacctgatcctgctgcagtacgtggacgacctgctgctggccgccaccagcgagctggactgccagcagggcaccagggccctgctgcagaccctgggcaacctgggctacagggccagcgccaagaaggcccagatctgccagaagcaggtgaagtacctgggctacctgctgaaggagggccagcggtggctgacagaggccagaaaggagaccgtgatgggccagcccacacccaagacccccaggcagctgcgggagttcctgggcaaggccggcttttgccggctgttcatccctggcttcgccgagatggccgccccactgtaccccctgaccaagcctgggaccctgttcaactggggccccgaccagcagaaggcctaccaggagatcaagcaggccctgctgaccgcccctgccctgggactgccagacctgaccaagcccttcgagctgttcgtggacgagaagcagggctacgccaagggcgtgctgacacagaagctgggcccatggaggagacccgtggcctacctgtccaagaagctggacccagtggccgccggctggccaccctgcctgaggatggtggccgccatcgccgtgctgaccaaggatgccggcaagctgaccatgggccagcccctggtgatcctggcccctcacgccgtggaggccctggtgaagcagccccccgacaggtggctgagcaacgccaggatgacccactaccaggccctgctgctggacaccgacagggtgcagttcggccctgtggtggccctgaaccccgccaccctgctgcccctgcccgaggagggcctgcagcacaattgcctggacatcctggccgaggcccacggaacccgccctgacctgaccgaccagcctctgcccgacgccgaccacacctggtataccgacggaagctccctgctgcaggagggccagaggaaggccggggccgccgtgacaaccgagaccgaggtgatctgggccaaggctctgcccgccggcaccagcgcccagcgggccgagctgatcgccctgacccaggccctgaagatggccgagggcaagaagctgaacgtgtacaccgactcccggtacgccttcgccaccgcccacatccacggcgaaatctacaggcggaggggctggctgaccagcgagggcaaggagatcaagaacaaggacgagatcctggccctgctgaaggccctgttcctgcccaagaggctgtctatcatccactgccccggccatcagaagggccacagcgccgaggccaggggcaaccggatggccgaccaggccgccaggaaagccgccatcaccgagacacccgatacctccaccctgctgatcgagaacagcagcccctccggcggaagcaagcgcaccgccgacggcagcgagttcgagcccaagaagaagcggaaggtgtga

SEQ ID NO: 422 - RNA, 2196 nt, synthetic construct
  misc_feature 1..2196: note = Description of Artificial Sequence: Synthetic polynucleotide
  source 1..2196: mol_type = other RNA
agcggaggcagctccggcggcagcagcggcagcgagaccccaggcaccagcgagagcgccacccccgagtccagcggcggcagctccggcggctccagcaccctgaatatcgaggacgagtatcggctgcacgagacctccaaggagcccgacgtgtccctggggtccacctggctgtccgactttccccaggcatgggctgagaccggcggcatgggactggccgtgcggcaggcccccctgatcatccccctgaaggccaccagcacccctgtgtccatcaagcagtaccccatgtcccaggaggccagactgggcatcaagccccacatccagaggctgctggatcagggcatcctggtgccttgccagtccccctggaacacccctctgctgcccgtgaagaagcctggcaccaacgattacagacccgtgcaggacctgcgcgaggtgaacaagagggtggaggacatccaccccaccgtgcccaacccatacaacctgctgtctggcctgcctccaagccaccagtggtacaccgtgctggacctgaaggacgccttcttctgcctgaggctgcaccccacctcccagcccctgttcgccttcgagtggagggacccagagatgggcatcagcggccagctgacctggacaaggctgccccagggcttcaagaatagcccaaccctgttcaacgaggccctgcacagggacctggccgacttccggatccagcaccccgacctgatcctgctgcagtacgtggacgacctgctgctggccgccaccagcgagctggactgccagcagggcacaagggccctgctgcagaccctgggcaacctgggctacagggcctcagctaagaaagcccagatctgtcagaagcaggtgaagtacctgggctacctgctgaaagagggccagaggtggctgacagaggcccgcaaggagaccgtgatggggcagcccacccccaagaccccccggcagctgagagagttcctgggcaaggccggattctgcaggctgttcatccctggcttcgccgagatggccgcccccctgtacccactgaccaagccaggcaccctgttcaactggggccccgaccagcagaaggcctaccaggagatcaagcaggccctgctgaccgcccccgccctgggcctgcccgacctgaccaagcccttcgagctgttcgtggacgaaaagcagggctacgccaaaggcgtgctgacccagaagctgggcccttggaggagacccgtggcctatctgtccaagaagctggaccctgtggccgccggctggcctccttgcctgcggatggtggccgccatcgccgtgctgaccaaggacgccggcaagctgaccatgggccagccactggtgatcctggccccccacgccgtggaggccctggtgaagcagcctcccgacagatggctgtctaacgcccggatgacccactaccaggccctgctgctggacaccgacagagtgcagttcggccccgtggtggccctgaaccccgccactctgctgcccctgccagaggagggcctgcagcacaattgcctggatatcctggccgaggcccacgggacacggccagacctgaccgatcagccactgcccgatgccgaccacacctggtacaccgacggcagcagcctgctgcaggagggccagagaaaggccggcgccgccgtgactaccgagaccgaagtgatctgggccaaggccctgccagccggcaccagcgcccagagggccgagctgatcgccctgacccaggccctgaagatggccgaggggaagaagctgaatgtgtacaccgactctaggtacgccttcgccaccgcccacatccacggcgagatctaccggcgcaggggctggctgaccagcgagggcaaggagatcaagaacaaggacgagatcctggccctgctgaaggccctgttcctgcccaagaggctgtccatcatccactgccctggccaccagaagggccacagcgccgaggccagaggcaaccggatggccgaccaggccgcccggaaggccgccatcaccgagaccccagacaccagcaccctgctgatcgagaactcctccccctccggcggcagcaagaggaccgccgacggaagcgagttcgagcctaagaagaagagaaaggtgtga

SEQ ID NO: 423 - RNA, 2196 nt, synthetic construct
  misc_feature 1..2196: note = Description of Artificial Sequence: Synthetic polynucleotide
  source 1..2196: mol_type = other RNA
agcggcggctcctcaggcggctccagcggctccgagacccccggcaccagcgagagcgccaccccagagagctccggcggcagcagcggcggcagctccactctgaacatcgaggacgagtacagactgcacgagaccagcaaggagcccgatgtgtccctgggcagcacctggctgtccgacttcccccaggcctgggccgagaccgggggcatgggcctggccgtgcggcaggcccccctgatcatccccctgaaggccaccagcacccctgtgagcattaaacagtaccccatgtcccaggaggccaggctgggcatcaagccccacatccagaggctgctggaccagggcatcctggtgccctgccagagcccctggaatacccccctgctgcccgtcaagaagcccggcacaaacgactacaggcccgtgcaggacctgagggaggtgaacaagagagtggaggacatccaccccaccgtgcctaatccctacaacctgctgtccgggctgccccccagccaccagtggtacaccgtgctggacctgaaggacgccttcttctgcctgagactgcacccaacctctcagcccctgttcgccttcgagtggcgggaccccgagatgggcatcagcgggcagctgacctggacccgcctgcctcagggcttcaagaattcccctaccctgttcaacgaggccctgcacagggacctggccgatttcagaatccagcaccccgacctgatcctgctgcagtacgtggacgacctgctgctggccgccaccagcgagctggactgccagcagggcacccgcgccctgctgcagaccctgggcaacctgggctacagggccagcgccaagaaggcccagatctgccagaagcaggtgaaatacctgggctacctgctgaaggagggccagcgctggctgaccgaggcccggaaggagaccgtgatgggccagcccacacccaagacccccaggcagctgagggagttcctgggcaaggccggcttctgcaggctgttcatcccaggcttcgccgaaatggctgcccccctgtacccactgaccaagcctggaacactgttcaactggggccctgatcagcagaaggcctaccaggagattaagcaggccctgctgaccgcccccgccctgggcctgcccgatctgaccaaacccttcgagctgttcgtggacgagaagcagggctacgccaagggcgtgctgacccagaagctgggcccttggagaaggcctgtggcctacctgtctaagaagctggaccctgtggccgccggctggcctccctgtctgagaatggtggccgccatcgccgtgctgaccaaggacgccggcaagctgaccatgggccagcccctggtgatcctggccccccacgccgtggaggccctggtgaagcagcccccagacagatggctgagcaatgcccggatgacccactaccaggccctgctgctggacaccgacagggtgcagtttggccctgtggtggccctgaaccctgccaccctgctgcccctgcccgaggagggcctgcagcacaattgcctggacatcctggccgaggcccacggcacccggcccgacctgaccgaccagcccctgcccgacgccgaccacacctggtacaccgacggcagcagcctgctgcaggaaggccagcggaaggccggcgccgccgtgaccaccgagacagaagtgatctgggccaaggctctgccagccggcaccagcgcccagagagccgagctgatcgccctgacccaggccctgaagatggccgagggcaagaagctgaacgtgtacaccgacagcaggtacgcctttgccaccgcccacatccatggcgagatctaccggaggaggggctggctgaccagcgagggcaaggagatcaagaacaaggacgagatcctggccctgctgaaggccctgttcctgcccaagagactgagcatcatccactgccccggccaccagaagggccacagcgccgaggccagaggaaaccgcatggccgaccaggctgccaggaaggccgccatcaccgagacccccgacacctccaccctgctgatcgagaactcttcccccagcggcggcagcaagagaaccgccgacggcagcgagttcgaacccaagaaaaagcggaaggtgtga

SEQ ID NO: 424 - RNA, 2196 nt, synthetic construct
  misc_feature 1..2196: note = Description of Artificial Sequence: Synthetic polynucleotide
  source 1..2196: mol_type = other RNA
tccggcggctcctccggcggcagcagcggcagcgagactcctggcaccagcgagagcgccacccccgagagcagcggcggcagctccggcggctcctccaccctgaacatcgaggacgagtaccggctgcacgagaccagcaaggaaccagacgtgtccctggggtccacctggctgtccgacttcccccaggcctgggccgagaccggcggcatgggcctggccgtgaggcaggcccctctgatcatccccctgaaggccaccagcacccctgtgagcatcaagcagtatcccatgagccaggaggccaggctgggcatcaagccccatatccagcgcctgctggaccagggcatcctggtgccttgccagagcccctggaacacccccctgctgcccgtgaagaaacccggcaccaacgactaccggcctgtgcaggacctgcgggaggtgaacaagcgcgtggaggacatccaccccaccgtgcctaacccctacaacctgctgagcggcctgccccccagccaccagtggtacaccgtgctggatctgaaggacgcctttttctgtctgcggctgcaccccaccagccagcccctgtttgccttcgagtggagagaccccgagatgggcatcagcggccagctgacctggaccagactgccccagggcttcaagaacagccccaccctgttcaacgaggccctgcacagagacctggccgacttcagaatccagcacccagacctgatcctgctgcagtacgtggacgacctgctgctggccgccacctccgagctggactgccagcaggggacccgggccctgctgcagaccctgggcaacctgggctacagggccagcgccaagaaggcccagatctgccagaagcaggtgaagtacctgggatacctgctgaaggagggccagaggtggctgaccgaggcccgcaaggagaccgtgatgggccagcccacccccaagacacccaggcagctgagggagttcctgggcaaagccggcttctgcaggctgttcatccccggcttcgccgagatggccgcccctctgtaccctctgaccaagcccggcaccctgttcaactggggccccgatcagcagaaggcctaccaggagatcaagcaggccctgctgaccgccccagccctgggcctgccagatctgaccaagcctttcgagctgttcgtggatgagaaacagggctacgccaagggcgtgctgacccagaagctgggaccctggaggagacctgtggcctacctgagcaagaagctggaccctgtggccgccggctggccaccttgcctgcggatggtggccgccatcgccgtgctgaccaaggacgccggcaagctgaccatgggccagcctctggtgatcctggccccccacgccgtggaggccctggtgaaacagccccccgacagatggctgtctaatgccagaatgacccactaccaggccctgctgctggacaccgaccgggtgcagttcggcccagtggtggccctgaaccccgccaccctgctgcctctgcccgaggagggcctgcagcacaattgtctggacatcctggccgaggcccacggcaccagacccgacctgaccgatcagcccctgccagacgccgaccacacctggtataccgacggcagcagcctgctgcaggagggccagaggaaggccggcgccgccgtgaccaccgagaccgaggtgatctgggccaaggccctgccagccggcacctccgcccagagggccgagctgatcgccctgacccaggccctgaagatggccgagggcaagaagctgaacgtgtacacagattcccggtacgccttcgccaccgcccacatccacggcgagatctaccggcggcgggggtggctgaccagcgagggcaaggagatcaaaaacaaggacgagatcctggccctgctgaaggccctgttcctgcctaagagactgtctatcatccactgcccaggccaccagaaggggcactccgccgaggctcgcggcaacaggatggccgaccaggccgccagaaaggccgccatcaccgagaccccagacaccagcaccctgctgatcgagaacagctccccctctggcggctccaagaggaccgccgacggcagcgagttcgagcccaagaagaagaggaaggtgtga

SEQ ID NO: 425 - RNA, 2196 nt, synthetic construct
  misc_feature 1..2196: note = Description of Artificial Sequence: Synthetic polynucleotide
  source 1..2196: mol_type = other RNA
tctggcggcagctccggcggcagcagcggcagcgagacccccggcaccagcgagtctgccaccccagagagctccggaggcagctccggcggcagcagcaccctgaacatcgaggacgagtacaggctgcacgagacctccaaggagcccgacgtgtctctgggcagcacctggctgtccgacttccctcaggcctgggcagagaccggcggcatgggactggccgtgcgccaggcccctctgatcatccctctgaaggccaccagcacccccgtgtccatcaagcagtatcctatgtctcaggaggccaggctgggcatcaagccccacatccagcggctgctggaccagggcatcctggtgccttgccagagcccctggaacacccctctgctgcctgtgaagaagcctggcaccaacgactacagaccagtgcaggatctgagggaggtgaataagagagtggaggacatccaccctaccgtgcccaacccctacaacctgctgtccggcctgccccctagccaccagtggtacaccgtgctggacctgaaggacgccttcttctgcctgcggctgcaccccaccagccagcccctgtttgccttcgagtggagagacccagagatgggcatcagcggccagctgacctggacaagactgccccagggcttcaagaacagtcccaccctgttcaatgaggccctgcacagggacctggccgacttccggatccagcaccccgacctgattctgctgcagtatgtggacgacctgctgctggccgccaccagcgagctggactgtcagcagggcaccagagccctgctgcagaccctgggcaacctgggctaccgggcctcagccaagaaggcccagatctgccagaagcaggtgaagtacctgggctacctgctgaaggagggccagagatggctgaccgaggccagaaaggagaccgtgatgggccagcccacccccaagacccctagacagctgagggagttcctgggcaaggccggcttctgccggctgttcatccccggcttcgccgagatggctgcccctctgtaccccctgaccaagcctggcaccctgttcaattggggccccgaccagcagaaggcctaccaggagatcaagcaggccctgctgaccgcccccgccctgggcctgccagacctgaccaagcccttcgagctgttcgtggacgagaagcagggctacgccaagggcgtgctgacccagaagctgggcccttggaggagacccgtggcctacctgtcaaagaagctggatccagtggccgccggctggccaccctgcctgcggatggtggccgccatcgccgtgctgaccaaggatgccggcaaactgaccatgggccagcccctggtgatcctggccccccacgccgtggaggccctggtgaagcagccacccgacagatggctgtctaacgcccgcatgacacactaccaggccctgctgctggacaccgacagggtgcagttcggccccgtggtggccctgaaccccgccaccctgctgcccctgcctgaggagggcctgcagcacaattgcctggatatcctggccgaggcccacggcacccggcccgacctgaccgaccagcccctgcccgacgccgaccacacctggtacaccgacggcagcagcctgctgcaggagggccagaggaaggccggcgccgccgtgaccacagagaccgaggtgatctgggccaaggccctgcccgccggcaccagcgcccagcgggccgagctgatcgccctgacccaggccctgaagatggccgagggaaagaagctgaacgtgtacaccgattccagatacgccttcgccaccgcccacatccacggcgagatctacaggaggagaggctggctgacctccgagggcaaggagatcaagaacaaggacgagattctggccctgctgaaggccctgttcctgcctaagagactgagcatcatccactgccccggccaccagaagggccacagcgccgaggcccggggcaataggatggccgaccaggccgcccggaaggccgccattaccgagactccagacacctccaccctgctgatcgagaattcctcccccagcggcgggagcaagagaaccgcagacggcagcgagttcgagcccaagaagaagaggaaggtgtga

SEQ ID NO: 426 - RNA, 2196 nt, synthetic construct
  misc_feature 1..2196: note = Description of Artificial Sequence: Synthetic polynucleotide
  source 1..2196: mol_type = other RNA
agcggaggctcctccggcggcagcagcgggagcgagaccccagggaccagcgagtccgccaccccagagagcagcggcggaagcagcggcggcagcagcacactgaacatcgaggacgagtacagactgcacgagaccagcaaggagcccgacgtgtccctgggctccacctggctgtccgacttcccccaggcctgggccgagacaggcggcatgggcctggccgtgcggcaggcccccctgatcatccccctgaaagccaccagcacccccgtgagcatcaagcagtaccccatgtcccaggaggcccggctgggcatcaagcctcacatccagcggctgctggatcagggcatcctggtgccctgccagtccccctggaacacccccctgctgccagtgaagaagcccggaaccaacgactatcggccagtgcaggacctgcgggaggtgaacaagcgggtggaggatatccaccccacagtgcccaacccctacaacctgctgtccggcctgcccccctcacaccagtggtacaccgtgctggacctgaaagacgccttcttctgcctgaggctgcacccaaccagccagcccctgttcgccttcgagtggagggaccccgagatggggatcagcggccagctgacctggacccggctgccccagggcttcaagaactcccccaccctgtttaacgaggccctgcacagggacctggccgacttccggatccagcaccccgacctgatcctgctgcagtacgtggacgatctgctgctggccgccacctccgagctggactgtcagcagggcacccgggccctgctgcagaccctgggcaacctgggctaccgggccagcgccaagaaggcccagatctgccagaagcaggtgaagtacctgggctacctgctgaaggagggccagaggtggctgaccgaggcccggaaggagaccgtgatgggccagcccacccccaagacccctaggcagctgagggagttcctgggcaaggccggcttttgccgcctgtttatccctgggttcgccgagatggccgcccccctgtaccccctgaccaaaccaggcactctgttcaactggggccccgaccagcagaaggcctaccaggagatcaagcaggccctgctgaccgcccccgccctgggcctgcccgacctgaccaagccattcgagctgttcgtggacgagaagcagggctacgccaagggagtgctgacacagaagctgggcccatggaggaggcccgtggcctacctgagcaagaagctggaccccgtggccgccggctggcccccctgcctgcggatggtggccgccatcgccgtgctgaccaaggacgccggcaagctgaccatgggccagcctctggtgatcctggccccccacgccgtggaggccctggtgaagcagcccccagacaggtggctgtccaacgccaggatgactcactaccaggccctgctgctggacaccgatcgcgtgcagttcggccctgtggtggccctgaaccccgccaccctgctgcccctgcctgaagagggcctgcagcacaactgcctggacatcctggccgaggcccacggcaccagacccgacctcaccgaccagccactgcccgacgccgaccacacctggtacaccgacggcagctccctgctgcaggagggccagagaaaggccggcgccgccgtgaccaccgagaccgaggtgatctgggccaaggccctgcccgccggcacctccgcccagcgggccgagctgatcgccctgacacaggccctgaagatggccgagggcaagaagctgaacgtgtacaccgactccaggtacgccttcgccaccgcccacatccacggcgaaatctacagacgcaggggctggctgaccagcgagggtaaggagatcaagaacaaggacgagatcctggccctgctgaaggccctgttcctgcccaaacggctgtccatcatccactgccccggccaccagaagggccactccgccgaggcccggggcaaccggatggccgaccaggccgcccggaaggccgccatcaccgagacccccgacaccagcaccctgctgatcgagaacagctccccctccggcggcagcaagagaaccgccgatggcagcgagttcgagccaaagaagaaacggaaggtgtga

SEQ ID NO: 427 - RNA, 2196 nt, synthetic construct
  misc_feature 1..2196: note = Description of Artificial Sequence: Synthetic polynucleotide
  source 1..2196: mol_type = other RNA
tctggcggcagcagcggaggaagcagcggcagcgagacccccggcaccagcgagagcgccacccccgagtccagcggcggctccagcggcggcagcagcaccctgaacatcgaggacgagtaccgcctgcacgagaccagcaaggagccagacgtgtccctgggctccacctggctgtccgactttcctcaggcctgggcagagaccggcggaatgggcctggccgtgaggcaggccccactcatcatccccctcaaggccaccagcacccccgtgagcatcaagcagtaccctatgagccaggaggccaggctgggaatcaagccccacatccagagactgctggaccagggcatcctggtgccctgccagagcccatggaacacccccctgctgcccgtgaagaagcccgggaccaacgactacagacccgtgcaggacctgagagaggtgaacaagcgcgtggaggacatccaccctaccgtgcccaatccttacaacctgctgtccggcctgccccccagccaccagtggtacaccgtgctggacctgaaggacgccttcttctgcctgcggctgcaccccacctcccagcccctgttcgccttcgagtggagagaccccgagatgggcatcagcggccagctgacctggaccaggctgccacagggcttcaagaactccccaaccctgtttaacgaggccctgcacagagacctggccgacttccggattcagcacccagacctgatcctgctgcagtacgtggacgatctgctgctggccgccacaagcgagctggattgccagcagggcacccgggccctgctgcagaccctgggcaacctgggctacagggcctccgccaagaaggcccagatctgccagaagcaggtgaagtatctgggctacctgctgaaggagggccagagatggctgaccgaggcccgcaaggagaccgtgatgggccagcctacccccaagacccccaggcagctgagggagttcctgggcaaggccggcttctgcagactgttcatccccggcttcgccgagatggccgcccctctgtaccccctgacaaagcctgggaccctgttcaactggggccccgaccagcagaaggcctaccaggagatcaagcaggccctgctgaccgcccccgccctgggcctgccagacctgacaaagcccttcgagctgttcgtggacgagaagcagggctacgccaagggcgtgctgacccagaagctgggcccctggcggagaccagtggcctatctgtccaagaagctggaccctgtggccgccggctggcctccttgcctgcggatggtggccgccatcgccgtgctgaccaaggacgccggcaaactgaccatgggccagcccctggtgatcctggccccacacgcagtggaggctctggtgaagcagccccccgacaggtggctgtctaacgccagaatgacccactaccaggccctgctgctggacaccgacagagtgcagttcggccctgtggtggccctgaaccccgccaccctgctgcctctgcccgaggagggcctgcagcacaactgcctggacatcctggccgaggcccacggcacacgccccgacctgaccgaccagccactgcccgacgccgaccacacctggtacaccgacggcagcagcctgctgcaggagggccagagaaaagccggcgccgccgtgaccaccgagaccgaggtgatttgggccaaggccctgcccgccggcaccagcgcccagagagccgagctgatcgccctgacccaggccctgaagatggccgagggcaagaaactgaacgtgtacaccgactccaggtatgccttcgccaccgcccacattcacggcgagatctacaggaggagaggctggctgaccagcgagggcaaggagatcaagaataaggacgagatcctggccctgctgaaggccctgttcctgcccaagcggctgtccatcatccactgcccaggccaccagaagggccacagcgccgaggccagaggcaacagaatggccgaccaggccgcccgcaaggccgccatcaccgagacccccgatacctccaccctgctgatcgagaacagctcccccagcggcggcagcaagaggaccgccgacggctccgagttcgagcctaagaagaagagaaaggtgtga

SEQ ID NO: 428 - RNA, 2196 nt, synthetic construct
  misc_feature 1..2196: note = Description of Artificial Sequence: Synthetic polynucleotide
  source 1..2196: mol_type = other RNA
agcggcggcagcagcggcggcagcagcggcagcgagacccccggcaccagcgagtccgccacccccgagagcagcggcggctcaagcggcggcagcagcaccctgaacatcgaggacgagtacagactgcacgagaccagcaaggagcccgacgtgtccctgggctctacctggctgagcgacttcccccaggcctgggccgagaccggcggaatgggcctggccgtgagacaggccccactgatcatcccactgaaggccaccagcacccccgtgagcatcaagcagtaccctatgtcacaggaggccagactgggcatcaagccacacatccagagactgctggaccagggcatcctggtgccctgccagagcccatggaacacccccctgctgcccgtcaagaagcccggcaccaacgactacaggcccgtgcaggacctgcgggaggtgaacaagcgcgtggaggacatccaccctaccgtgcccaacccctacaacctgctgtccggcctgccacccagccatcagtggtacaccgtgctggacctgaaggacgccttcttctgcctgagactgcaccccacctcccagcctctgttcgccttcgagtggagagaccccgagatgggcatctccggccagctgacttggacaagactgccccagggcttcaagaattctccaaccctgttcaacgaggccctgcaccgggacctggccgacttcaggatccagcacccagacctgatcctgctgcagtacgtggacgacctgctgctggccgccaccagcgagctcgactgccagcagggcacccgggccctgctgcagactctgggcaacctgggctacagggccagcgccaagaaggcccagatctgccagaagcaggtgaagtacctgggctacctgctgaaggagggccagaggtggctgaccgaggccaggaaggagaccgtgatgggccagccaacccctaagacccccagacagctgagggagttcctgggcaaggccggcttctgccggctgttcatccccggcttcgccgagatggccgcccccctgtaccccctgaccaagcctggcaccctgttcaactggggccccgaccagcagaaggcctaccaggagatcaagcaggccctgctgaccgcccccgccctgggcctgcccgatctgaccaagccattcgagctgttcgtggacgagaaacagggctacgccaagggcgtgctgacccagaagctgggcccctggaggagacctgtggcctacctgagcaaaaagctggacccagtggccgccgggtggcccccctgcctgagaatggtggccgccatcgccgtgctgaccaaggacgccggcaagctgaccatgggacagcctctggtgatcctggccccccacgccgtggaggccctggtgaagcagccccccgataggtggctgagtaatgcccggatgacccactaccaggccctgctgctggacaccgacagggtgcagttcggccccgtggtggccctgaaccccgccaccctgctgccactgcccgaggagggcctgcagcataactgcctggacatcctggccgaggcccacggcaccaggcccgacctgaccgatcagcctctgcccgacgccgatcacacctggtacaccgatggcagcagcctgctgcaggagggccagagaaaggccggcgccgccgtgaccaccgagaccgaggtgatctgggccaaggccctgcccgccggcaccagcgcccagcgggccgaactgatcgccctgacccaggccctgaagatggccgagggcaagaagctgaacgtgtacaccgacagccggtacgccttcgccaccgctcacatccacggcgagatttacaggagaagaggctggctgaccagcgaaggcaaggagatcaagaacaaggacgagattctggccctgctgaaggccctgttcctgcctaagagactgtctatcatccactgccccggccaccagaaaggccacagcgccgaggccaggggcaacaggatggccgaccaggccgcccggaaggccgccatcaccgagacccccgacaccagcaccctgctgatcgagaactccagcccttccggcggctccaagaggactgccgacggctccgagttcgagcctaagaagaagaggaaggtgtga

SEQ ID NO: 429 - RNA, 2196 nt, synthetic construct
  misc_feature 1..2196: note = Description of Artificial Sequence: Synthetic polynucleotide
  source 1..2196: mol_type = other RNA
agcggcggaagcagcggcggctcctccggcagcgagacccccggcaccagcgagtccgccacccccgagagcagcggcggctccagcggcggctccagcaccctgaacatcgaggacgagtacaggctgcacgagaccagcaaggagcccgacgtgtctctgggcagcacctggctgtccgacttcccacaggcctgggccgagaccggcggcatgggcctggccgtgagacaggcccctctgatcatcccactgaaggccacctccaccccagtgtccatcaaacagtaccccatgagccaggaggcccggctgggcatcaagccacacatccagaggctgctggaccagggcatcctggtgccctgccagagcccctggaatacccccctgctgcccgtgaagaagcccggcaccaacgactacaggccagtgcaggatctgcgggaggtgaacaagcgggtggaagatatccaccctaccgtgcccaacccctacaacctgctgagcggcctgcctccctcccatcagtggtacaccgtgctggacctgaaggacgccttcttctgcctgcgtctgcaccctaccagccagcccctgttcgccttcgagtggagggacccagagatgggcatcagcggccagctgacttggaccaggctgcctcagggctttaagaattcccccaccctgtttaacgaggccctgcacagagacctggccgatttcaggatccagcaccccgacctgatcctgctgcagtacgtggacgacctgctgctggccgccacctccgagctggattgccagcagggcacccgcgctctgctgcagaccctgggcaacctgggctacagagccagcgccaagaaggcccagatttgccagaagcaggtgaagtacctggggtacctgctgaaagagggccagagatggctgaccgaggccagaaaggagaccgtgatgggccagcccaccccaaagacacccaggcagctgcgggagttcctgggcaaggccggcttctgcagactgtttatccccggcttcgccgagatggccgcccccctgtaccctctgaccaagcctggaaccctgtttaactggggccccgatcagcagaaggcctaccaggagatcaagcaggccctgctgaccgcccccgccctggggctgcccgacctgaccaagcccttcgagctgttcgtggacgagaagcagggctacgccaagggcgtgctgacccagaagctggggccctggaggagacccgtggcctacctgtctaagaagctggaccccgtggccgccggctggcccccctgcctgagaatggtggccgccatcgccgtgctgacaaaggatgccggcaagctgaccatgggccagcccctggtgatcctggccccccacgctgtggaggccctggtgaagcagcctcccgaccggtggctgagcaacgccagaatgacccactaccaggccctgctgctggacacagatcgggtgcagttcggccccgtggtggccctgaaccccgccaccctgctgcccctgcctgaggagggcctgcagcacaactgcctggacatcctggccgaggcccacggcacccggcccgatctgaccgaccagcccctgcccgacgccgaccacacctggtacaccgatggaagcagcctgctgcaggagggccagagaaaggccggggccgccgtgaccaccgagaccgaggtgatctgggccaaggccctgcccgccggcacctccgcccagagggccgagctgatcgccctgacccaggccctgaagatggccgagggcaagaagctgaacgtgtacaccgacagcaggtacgccttcgccaccgcccacatccacggcgagatctacaggcggagaggctggctgactagcgagggcaaggagatcaagaacaaggacgagatcctggccctgctgaaggccctgttcctgccaaagcgcctgagcattatccactgccccggccaccagaagggccacagcgccgaggccagaggcaacaggatggccgaccaggccgccaggaaggccgccatcaccgagacccctgacaccagcaccctgctgatcgagaacagctcccccagcggcggctccaagaggacagccgatggcagcgagttcgagcccaagaagaagcgcaaggtgtga

SEQ ID NO: 430 - RNA, 2196 nt, synthetic construct
  misc_feature 1..2196: note = Description of Artificial Sequence: Synthetic polynucleotide
  source 1..2196: mol_type = other RNA
agcggcggcagcagcggcggcagcagcggcagcgagacccccggcaccagcgagagcgccacccccgagtctagcggcggcagcagcggcgggagcagcactctgaacatcgaggacgagtaccgcctgcacgagaccagcaaagagcccgacgtgtccctgggctccacctggctgagcgactttcctcaggcctgggccgagaccggcggcatgggcctggccgtgcggcaggctcctctgatcatcccactgaaggccaccagcacccccgtgagcatcaagcagtatcccatgagccaggaggccaggctgggcatcaagccccacatccagaggctgctggaccagggcatcctggtgccctgccagagcccctggaacacccccctgctgcccgtgaagaagcccggcaccaacgattacagacccgtgcaggacctgcgggaggtgaacaagagggtggaggatatccaccccaccgtgcccaacccttacaacctgctgtccggcctgccccccagccaccagtggtacaccgtgctggacctgaaggacgccttcttctgcctgcgcctgcaccccacaagccagccactgttcgccttcgagtggagggatcccgagatgggcatctccggccagctcacctggacccggctgccccagggcttcaagaacagcccaaccctgtttaacgaggccctgcacagagacctggccgacttcaggattcagcacccagacctgatcctgctgcagtacgtggacgatctgctgctggccgccacctccgagctggattgtcagcagggcaccagggccctgctgcagaccctgggcaacctgggctacagggcctccgccaagaaggcccagatctgccagaagcaggtgaagtacctgggctacctgctgaaggagggccagagatggctgaccgaggccagaaaggagaccgtgatgggccagcccacacccaagacacccaggcagctgagggagttcctgggcaaggccggcttctgcagactgtttatccctggcttcgccgagatggccgccccactgtacccactgaccaagcccggcaccctgttcaactggggccccgaccagcagaaggcctaccaggagatcaagcaggccctgctgaccgcccctgccctgggcctgcccgatctgaccaagccattcgagctgttcgtggacgagaaacagggctacgccaagggcgtgctgacccagaagctgggcccctggaggagacccgtggcctacctgagcaagaagctggaccccgtggccgccggatggcctccctgtctgcggatggtggccgccatcgccgtgctgaccaaggacgccggcaagctgaccatgggccagccactggtgatcctggcccctcacgccgtggaggccctggtgaagcagcccccagacaggtggctgtccaacgccagaatgacccactaccaggccctgctgctggacaccgacagagtgcagttcggccccgtggtggccctgaacccagccaccctgctgcctctgcctgaagagggcctgcagcacaattgcctggacatcctggccgaggcccacggcaccaggcccgacctgaccgatcagcccctgcccgacgccgaccacacctggtacaccgacggcagcagcctgctgcaggaaggacagagaaaggccggcgccgccgtgaccaccgagaccgaggtgatctgggccaaggccctgcccgccggcaccagcgcccagagagccgagctgatcgccctgacccaggccctgaagatggccgagggcaaaaagctgaacgtgtacaccgacagcagatacgccttcgccaccgcccacatccatggcgagatctataggcggagaggctggctgaccagcgaaggcaaggagatcaagaacaaggacgagatcctggctctgctgaaggccctgttcctgcctaagagactgtccatcatccactgccccggccaccagaagggccacagcgccgaggcccggggcaatagaatggccgaccaggccgccaggaaggccgccatcaccgagaccccagacacctccaccctgctgatcgagaacagcagccccagcggcggcagcaagaggaccgcagacgggagcgagttcgagccaaagaagaagaggaaggtgtga

SEQ ID NO: 431 - RNA, 2196 nt, synthetic construct
  misc_feature 1..2196: note = Description of Artificial Sequence: Synthetic polynucleotide
  source 1..2196: mol_type = other RNA
agcggcggcagcagcggcggcagcagcggaagcgagacccccggcaccagcgagagcgccacccccgagagctccggcggaagctccggcggctctagcaccctgaacatcgaggacgagtaccggctgcacgagacctccaaggagcccgatgtgtccctgggcagcacctggctgtccgactttccccaggcctgggccgagaccggcggcatgggactggccgtgcggcaggcccctctgatcatccccctgaaggccaccagcacccccgtgtccatcaaacagtaccctatgagccaggaggccaggctgggcatcaagccccacattcagaggctgctggatcagggcatcctggtgccttgccagagtccctggaacacccctctgctgcctgtgaagaagccaggcaccaatgactacaggcctgtgcaggatctgcgcgaggtgaacaagcgggtggaggacatccacccaaccgtgccaaacccttacaacctgctgtccggcctgcccccctcccaccagtggtacaccgtgctggacctgaaggatgccttcttctgcctgagactgcaccccacctcccagcccctgttcgccttcgagtggcgggatcccgagatgggcatctccggccagctgacctggaccagactgccccagggcttcaagaattcccccaccctgttcaacgaagccctgcacagggacctggccgatttccggatccagcaccctgacctgattctgctgcagtatgtggatgacctgctgctggccgccaccagcgagctggactgccagcagggcaccagagccctgctgcagaccctgggcaatctgggatatagggccagcgccaagaaagcccagatctgccagaagcaggtgaagtacctgggctacctgctgaaggagggccagagatggctgaccgaggcaagaaaggagactgtgatgggccagcccacccccaagacccccaggcagctgagagagttcctgggcaaagccggcttctgcagactgttcatccccggctttgccgagatggccgccccactgtaccctctgaccaagcccggcaccctgtttaactggggccccgaccagcagaaggcctaccaggagatcaagcaggccctgctgaccgcccctgccctgggcctgcccgacctgactaagcctttcgagctgttcgtggacgagaagcagggctacgccaagggcgtgctgacccagaagctgggcccatggcgccggcccgtggcctacctgtccaagaagctggatcctgtggccgccggctggcccccctgcctgcggatggtggccgccatcgccgtgctcaccaaggacgccggcaagctgaccatgggccagcccctggtgatcctggccccacacgccgtggaggccctggtgaagcagccacccgacagatggctgtccaacgccagaatgacccactatcaggccctgctgctggacaccgaccgggtgcagtttggccccgtggtggccctgaaccccgccaccctgctgcccctgcccgaggagggcctgcagcacaattgcctggacatcctggccgaggcccacggcaccaggcccgatctgaccgaccagcccctgcccgacgccgaccacacctggtacacagacggctccagcctgctgcaggagggccagaggaaggccggcgccgccgtgaccaccgaaaccgaggtgatctgggccaaggccctgcctgccggcaccagcgcccagagggccgagctgatcgccctgacccaggccctgaagatggccgagggcaagaagctgaatgtgtacaccgacagcaggtatgccttcgccaccgcccacatccacggggagatctacagacgcagaggctggctgaccagcgagggcaaggagatcaagaacaaggacgagatcctggccctgctgaaggccctgttcctgcccaagcgcctgtccatcatccactgccccggccaccagaagggccacagcgccgaggcccggggcaataggatggccgaccaggccgccagaaaggccgccatcaccgaaacccccgacacctcaaccctgctgatcgagaacagcagccccagcggcggcagcaagaggaccgccgacggcagcgagttcgagcccaagaagaagagaaaggtgtga

SEQ ID NO: 432 - RNA, 2196 nt, synthetic construct
  misc_feature 1..2196: note = Description of Artificial Sequence: Synthetic polynucleotide
  source 1..2196: mol_type = other RNA
agcggaggctccagcggcggcagctccggctccgagacccccggcaccagcgagagcgccacccccgagagctccggcggcagcagcggcggcagctccaccctgaacatcgaggacgaatacaggctgcacgagaccagcaaggagcccgacgtgtccctgggcagcacctggctgtccgactttccccaggcctgggccgagaccggcggcatgggcctggccgtgcggcaggcccccctgatcatccccctgaaggccaccagcaccccagtgagcatcaagcagtaccccatgtcccaggaggccaggctgggcatcaagccccacatccagaggctgctggaccagggcatcctggtgccctgccagagcccctggaacacccctctgctgcccgtgaagaagcccggcaccaacgactacaggcccgtgcaggacctgcgggaggtgaacaagcgcgtggaggacattcaccccaccgtgcccaacccctacaacctgctgtccggcctgcccccttctcaccagtggtacaccgtgctggacctgaaggacgccttcttctgcctgagactgcaccccacaagccagcctctgttcgccttcgagtggagagaccccgagatgggcatctccggccagctgacatggacccgcctgccccagggctttaagaacagccctaccctgttcaacgaggccctgcacagggacctggccgacttcaggatccagcaccccgacctgatcctgctgcagtatgtggacgatctgctgctggccgccacctccgagctggactgccagcagggcactcgggccctgctgcagacactgggcaatctgggctacagggcttccgccaagaaggcccagatctgccagaagcaggtgaagtacctgggctatctgctgaaggagggccagagatggctgaccgaggccagaaaggagaccgtgatgggccagcccacccccaagacccccagacagctgagggagttcctgggcaaggccgggttctgcagactgttcatccctggcttcgccgagatggctgcccccctgtacccactgaccaagcccggcaccctgtttaattggggcccagaccagcagaaggcctaccaggaaatcaagcaggccctgctgaccgcccccgccctgggcctgccagacctgacaaagcccttcgagctgttcgtggacgagaagcagggctacgccaagggcgtgctgacccagaagctgggaccctggcggaggcctgtggcctacctgagcaagaagctggacccagtggccgccggctggcccccatgcctgcggatggtggccgccatcgccgtgctgaccaaggacgccggcaagctgaccatgggccagcctctggtgatcctggccccccacgccgtggaggccctggtgaagcagccccccgacaggtggctgtccaacgccaggatgacccactaccaggccctgctgctggacaccgatcgggtgcagttcggccccgtggtggccctgaaccccgccaccctgctgcccctgccagaggaggggctgcagcacaactgcctggacatcctggccgaggcccacggcacccggcccgacctgaccgaccagcctctgcccgatgccgatcacacctggtacacagacggctccagcctgctgcaggaggggcagagaaaggccggcgccgccgtgaccacagagaccgaggtgatctgggccaaggccctgcccgccggcacctccgcccagcgcgccgagctgatcgccctgacacaggccctgaagatggccgagggcaagaagctgaacgtgtacaccgacagcaggtacgccttcgccaccgcccacatccacggcgagatctacaggaggcggggctggctgaccagcgagggcaaggagatcaagaacaaggacgagatcctggcactgctgaaggccctgttcctgccaaaacgcctgtctattatccactgcccgggccaccagaagggccactccgccgaggccaggggcaacagaatggccgaccaggccgccaggaaggccgccatcaccgagaccccagataccagcaccctgctgatcgagaattccagtccaagcggcggctccaagcggaccgccgacggctccgagttcgagcccaagaagaagaggaaggtgtaa

SEQ ID NO: 433 - RNA, 2196 nt, synthetic construct
  misc_feature 1..2196: note = Description of Artificial Sequence: Synthetic polynucleotide
  source 1..2196: mol_type = other RNA
tctggcggcagcagcggcggcagcagcggctccgagacccccggcaccagcgagagcgccacccccgagagcagcggcggcagcagcggcggcagctccacactgaatatcgaggacgagtaccggctgcacgagacctccaaggagcccgacgtgagcctgggcagcacctggctgtccgactttccccaggcctgggccgagaccggcggcatgggcctggccgtgcggcaggcccccctgatcatccccctgaaggccacctccacccccgtgtccatcaagcagtaccccatgagccaggaggccaggctgggcatcaagccccacatccagcggctgctggaccagggcatcctggtgccctgccagtccccctggaacaccccactgctgcccgtgaagaagcctggcaccaacgactacaggcccgtgcaggacctgagggaggtgaacaagagagtggaggacatccaccccaccgtgcctaatccctacaacctgctgagcggcctgcccccctcccaccagtggtacaccgtgctggacctgaaggacgccttcttctgcctgcggctgcaccctaccagccagcccctgttcgccttcgagtggagagaccccgagatgggcatcagcggacagctgacctggacccggctgccccagggattcaagaacagcccaacactgtttaacgaggccctgcaccgggacctggccgacttccggatccagcaccccgacctgatcctgctgcagtacgtggacgacctgctgctggccgccacctctgagctggactgccagcagggcaccagggccctgctgcagaccctgggcaacctgggataccgggccagcgccaagaaggcccagatctgtcagaagcaggtgaagtacctgggctacctgctgaaggagggccagaggtggctgaccgaggccagaaaggagaccgtgatgggccagcccacccctaagacccccagacagctgagagagtttctgggaaaggccggcttctgcagactgttcatccccggcttcgccgagatggccgcccccctgtaccctctgaccaagccaggcaccctgttcaactggggccccgaccagcagaaggcctaccaggagatcaagcaggccctgctgaccgcccccgccctgggcctgccagacctgaccaaaccttttgagctgttcgtggacgagaagcagggctacgccaagggggtgctgacccagaagctgggcccctggagaaggcccgtggcctacctgtccaagaagctggaccccgtggccgccggctggcccccatgcctgaggatggtggccgccatcgccgtgctgaccaaggacgccggcaagctgaccatgggccagcctctggtgatcctggccccccacgccgtggaggccctggtgaagcagccacccgatagatggctgtccaacgcccggatgacacactaccaggccctgctgctggacaccgacagggtgcagttcggccccgtggtggccctgaaccctgccaccctgctgcccctgcccgaggagggcctgcagcacaactgcctggacatcctggccgaggcccacggcaccagacccgatctgaccgaccagcccctgcccgacgccgaccacacttggtacaccgatggcagcagcctgctgcaggagggccagaggaaggccggggccgccgtgaccaccgagaccgaagtgatctgggccaaggccctgcctgccggcaccagcgcccagcgggccgagctgatcgccctgacacaggccctgaagatggccgagggcaagaagctgaacgtgtacacagactccagatacgccttcgccaccgcccacatccacggcgagatctacagacgcagaggctggctgacctccgagggcaaggagatcaagaacaaagacgagatcctggccctgctgaaggccctgttcctgccaaagagactgtctatcatccactgtcccggccaccagaagggccacagcgccgaggccagaggcaatagaatggccgaccaggccgcccggaaggccgccatcacagagaccccagacaccagcaccctgctgatcgagaactcctccccctccggcgggagcaagagaaccgccgacggcagcgagttcgagcctaagaagaagcgcaaggtgtga

SEQ ID NO: 434 - RNA, 2196 nt, synthetic construct
  misc_feature 1..2196: note = Description of Artificial Sequence: Synthetic polynucleotide
  source 1..2196: mol_type = other RNA
agcggcggctctagcggcggcagcagcggcagcgagacccctggcacctccgagagcgccacacccgagtccagcggcggcagcagcggcggctcctctaccctgaacatcgaggacgagtacagactgcacgagacctccaaggagcccgacgtgagcctgggcagcacctggctgtcagacttccctcaggcctgggccgagaccggcggcatgggcctggccgtgcggcaggcccccctgatcatccccctgaaggccaccagcacccccgtgagcatcaaacagtaccccatgtcccaggaggcccgcctgggcatcaagccccacatccagaggctgctggaccagggcatcctggtgccctgtcagtctccttggaatacccccctgctgcccgtgaagaagcccggcaccaacgactacaggcccgtgcaggacctgcgggaggtgaacaagcgggtggaggacatccaccccaccgtgcccaatccatacaacctgctgagcggcctgccaccatcccaccagtggtacaccgtgctggacctgaaggacgccttcttctgcctgcggctgcaccccaccagccagcccctgttcgccttcgagtggagggaccctgagatgggcatcagcggccagctgacctggaccagactgcctcagggctttaagaacagccctaccctgttcaacgaggccctgcacagagatctggccgacttccgcatccagcaccccgacctgattctgctgcagtacgtggacgacctgctgctggccgccacctccgagctggactgccagcagggcacaagagccctgctgcagaccctgggcaacctgggctacagggccagcgccaagaaggcccagatctgccagaagcaggtgaagtacctgggctacctgctgaaggagggccagaggtggctgaccgaggccagaaaggagaccgtgatgggccagccaacccccaagaccccccggcagctgagggagttcctgggcaaggccggcttctgcagactgtttatccccggattcgccgagatggccgcccctctgtatcccctgaccaagcctggcaccctgttcaactggggccccgaccagcagaaggcctaccaggagatcaagcaggccctgctgaccgcccccgccctgggcctgcctgacctgaccaagcccttcgagctgttcgtggacgagaagcagggctacgccaagggcgtgctgacacagaaactgggcccctggcggcgccctgtggcctacctgtccaagaagctggaccccgtggccgccggctggcccccctgcctgcggatggtggccgctatcgccgtgctgaccaaggacgccggcaagctgaccatgggccagccactggtgatcctggccccccacgccgtggaggccctggtgaagcagccccccgaccggtggctgtctaacgccagaatgactcactaccaggccctgctgctggacaccgatcgggtgcagttcggccctgtggtggccctgaacccagccacactgctgccactgcccgaggagggcctgcagcacaactgcctggacatcctggccgaggcccacggcacccggcccgacctgaccgatcagcccctgcccgacgccgaccacacttggtacaccgatggcagcagcctgctgcaggagggccagagaaaggccggggccgccgtgaccaccgagaccgaggtgatctgggctaaggccctgcccgccggcaccagcgcccagagagccgagctgatcgccctgacccaggccctgaaaatggccgagggcaagaagctgaatgtgtacaccgactccagatacgccttcgccacagcccacatccacggcgagatctatcggaggaggggctggctgaccagcgaggggaaggagatcaagaacaaggacgagatcctggccctgctgaaggccctgttcctgccaaaacgcctgtctatcatccactgccccggccaccagaagggccactccgccgaggccaggggcaacagaatggccgaccaggccgccaggaaggccgccatcaccgagacccccgacacctccaccctgctgatcgagaacagcagccccagcggcggctccaagaggacagccgacggctccgagttcgagcctaagaagaaaaggaaggtgtga

SEQ ID NO: 435 - RNA, 2196 nt, synthetic construct
  misc_feature 1..2196: note = Description of Artificial Sequence: Synthetic polynucleotide
  source 1..2196: mol_type = other RNA
agcggcgggtcctccggcggctccagcggctctgagacccccggcaccagcgagtccgccacccccgagtccagcggcggctcctccggcggaagctccaccctgaatatcgaggacgagtacaggctgcacgagaccagcaaggagcccgacgtgagcctgggctccacctggctgtccgactttccacaggcctgggccgagacaggcggcatgggcctggccgtgcgccaggcccctctgatcatccccctgaaggccaccagcaccccagtgagcatcaagcagtaccccatgagccaggaggccagactgggcatcaagcctcacattcagagactgctggaccagggcatcctggtgccctgccagagcccctggaacacacctctgctgcccgtgaagaagcccggcaccaacgactatagacccgtgcaggacctgagagaggtgaacaagagggtggaggacatccatcctaccgtgcctaatccctacaatctgctgtctggactgcctcctagccaccagtggtacaccgtgctggacctgaaggatgccttcttctgcctgcgcctgcacccaacctcccagcccctgttcgccttcgagtggagagatcctgagatgggcatcagcggccagctgacctggaccagactgccccagggattcaagaatagccccacactgttcaacgaggccctgcaccgcgacctggccgacttcagaatccagcatcctgacctgatcctgctgcagtacgtggacgacctgctgctggccgccacctccgagctggactgccagcagggaacccgcgccctgctgcagaccctgggcaacctgggctacagggccagcgccaagaaggcccagatctgccagaagcaggtgaagtacctgggctacctgctgaaggagggccagagatggctgaccgaggccaggaaagagaccgtgatgggccagcccaccccaaagacccctcggcagctgcgggagttcctgggcaaggccggcttctgcagactgttcatccccggcttcgccgagatggccgcccccctgtaccccctgaccaagcctggcaccctgttcaactggggccccgaccagcagaaggcctaccaggagatcaagcaggccctgctgacagcccccgccctgggactgcccgacctgaccaagcctttcgagctgttcgtggacgagaagcagggctacgccaagggcgtgctgacccagaagctgggcccatggcggaggcccgtggcctacctgtccaagaagctggaccccgtggccgccggctggcccccctgcctgcgcatggtggccgccatcgccgtgctgaccaaggacgccggcaagctgaccatgggccagccactggtgatcctggccccacacgccgtggaggccctggtgaagcagccccccgacagatggctgtccaacgccaggatgacacactaccaggccctgctgctggacaccgacagagtgcagtttggccccgtggtggccctgaatcccgccacactgctgcccctgcctgaggagggcctgcagcacaactgcctggacatcctggccgaggcccacggcaccagacccgacctgaccgaccagcccctgcccgacgccgaccacacctggtacaccgatggcagcagcctgctgcaggagggccagagaaaggccggcgccgccgtgaccaccgagaccgaagtgatctgggccaaggccctgcctgccggcacaagcgcccagagggccgagctgattgccctgacccaggccctgaagatggccgagggcaagaagctgaacgtgtacaccgacagcaggtacgccttcgccaccgcccacattcacggcgagatctacaggagaaggggctggctgaccagcgagggcaaggagatcaagaacaaagacgagatcctggccctgctgaaggccctgttcctgcccaagaggctgtctatcatccactgccccggccaccagaagggccactccgccgaggccagaggcaacaggatggccgaccaggccgctaggaaggccgccatcaccgaaacccccgacaccagcacactgctgatcgagaacagcagccctagcggcggcagcaagagaaccgccgacggcagcgagttcgagcctaagaagaagaggaaggtgtga

SEQ ID NO: 436 - RNA, 2196 nt, synthetic construct
  misc_feature 1..2196: note = Description of Artificial Sequence: Synthetic polynucleotide
  source 1..2196: mol_type = other RNA
tccggaggcagctctggcggcagcagcggaagcgagacccccggcaccagcgagagcgccacacccgagtctagcggcggcagcagcggcggcagctccaccctgaatatcgaggacgagtacaggctgcacgagaccagcaaggagcccgatgtgtctctgggcagcacctggctgagcgatttcccccaggcctgggccgagaccggcggcatgggactggccgtgcggcaggcccctctgattatcccactgaaggccacctccacccctgtgagcatcaagcagtatcccatgtcccaggaggcccggctgggaatcaagccccacatccagagactgctggaccagggcatcctggtgccctgccagagcccctggaacaccccactgctgcccgtgaagaagccaggcaccaacgactacagacccgtgcaggatctgcgcgaggtgaacaagagagtggaggatatccaccccaccgtgccaaacccatacaacctgctgagcggcctgccccctagccaccagtggtacaccgtgctggacctgaaggatgccttcttctgcctgagactgcaccctacctctcagccactgttcgccttcgagtggcgggacccagagatgggcatcagcgggcagctgacctggaccaggctgccccagggcttcaagaatagccctaccctgttcaacgaggccctgcacagggacctggccgacttcagaatccagcaccccgacctgatcctgctgcagtacgtggacgacctgctgctggccgccacctccgagctggattgtcagcagggcaccagggccctgctgcagacactgggcaacctgggctacagggccagcgccaagaaggcccagatctgccagaagcaggtgaagtacctgggctacctgctgaaggagggccagcggtggctgaccgaggcccggaaggagaccgtgatgggccagcccacccccaagaccccaagacagctgagggagttcctgggaaaggccggcttctgccggctgttcatccccggcttcgccgagatggccgcccccctgtaccctctgaccaaacccggcaccctgttcaattggggccccgatcagcagaaggcctaccaggagattaagcaggccctgctgaccgcccctgccctgggcctgcccgacctgaccaagccattcgagctgttcgtggacgagaagcagggctacgccaagggcgtgctgacccagaagctgggcccttggcggagacccgtggcctacctgtccaagaagctggaccccgtggccgccggctggcccccctgcctgcggatggtggccgccatcgccgtgctgaccaaggacgccggaaagctgaccatgggccagcccctggtgatcctggccccccacgccgtggaggccctggtgaagcagccccctgacagatggctgtccaatgccaggatgacccactaccaggccctgctgctggacaccgacagagtgcagtttggccctgtggtggccctgaaccctgccaccctgctgcctctgcccgaggagggcctgcagcacaactgcctggacatcctggccgaggcccacggcacccggcccgacctgaccgaccagcctctgcccgacgccgaccacacctggtacaccgacggcagctccctgctgcaggagggccagaggaaggccggcgccgccgtgaccaccgaaaccgaggtcatctgggccaaggccctgcccgccggcaccagcgcccagagggccgagctgatcgccctgacccaggccctgaagatggccgagggcaagaagctgaacgtgtacaccgacagtaggtacgccttcgccaccgcccacatccacggcgagatctaccggaggagaggctggctgaccagcgagggcaaggagatcaagaacaaagacgagatcctggccctgctgaaggccctgttcctgcccaagaggctgagcatcatccactgccctggccaccagaagggccacagcgccgaggccaggggaaaccggatggccgatcaggccgcccggaaggccgccatcaccgagacccccgacaccagcaccctgctgatcgagaactctagcccaagcggcggcagcaagagaaccgccgacgggtccgagttcgagccaaagaagaagagaaaggtgtga

SEQ ID NO: 437 - RNA, 2196 nt, synthetic construct
  misc_feature 1..2196: note = Description of Artificial Sequence: Synthetic polynucleotide
  source 1..2196: mol_type = other RNA
agcggcggctctagcggcggcagcagcggctccgagacccccggcaccagcgagagcgccacccccgagagcagcggcggcagcagcggcggctccagcaccctgaacatcgaggacgagtatagactgcacgagaccagcaaggagcccgacgtgagcctgggctccacctggctgtccgactttccacaggcctgggccgagaccggcggcatgggcctggccgtgcggcaggcccctctgatcatcccactgaaggccaccagcacccccgtgtccattaagcagtaccctatgtcacaggaggccaggctgggcatcaagccccacatccagaggctgctggaccagggcatcctggtgccctgccagtccccctggaacaccccactgctgcccgtgaagaagcccggcaccaacgactacaggcccgtgcaggacctgcgggaggtgaacaagcgggtggaggacatccaccctaccgtgcctaacccctataacctgctgtctggcctgcctcccagccaccagtggtacacagtgctggatctgaaggacgccttcttctgcctgcgcctgcaccccacctcccagccactgttcgccttcgagtggagagaccccgagatgggcatctctgggcagctgacctggacccgcctgcctcagggcttcaagaactcccctaccctgttcaacgaggccctgcacagggacctggccgacttcagaatccagcaccccgacctgatcctgctccagtacgtggacgacctgctgctggccgccacctccgagctggattgccagcagggcacacgggccctgctgcagaccctgggaaatctgggctaccgcgccagcgccaagaaggctcagatctgtcagaagcaggtgaaatacctgggctacctgctgaaggagggacagaggtggctgaccgaggccaggaaggagaccgtgatgggccagcccacccctaagacccccaggcagctgcgcgagttcctgggcaaggccggcttctgcaggctgttcatccccggcttcgccgagatggccgcccccctgtaccccctgacaaagcccggcaccctgttcaactggggccccgaccagcagaaggcctaccaggagatcaagcaggccctgctgaccgccccagccctggggctgcccgacctgaccaagcccttcgagctgttcgtggacgagaagcagggctacgccaagggcgtgctgacccagaagctgggcccatggagaaggcccgtggcctacctgagcaagaagctggatcctgtggccgccggctggcctccctgtctgcgcatggtggccgccatcgccgtgctgaccaaggacgccggcaagctgaccatgggccagcccctggtgatcctggccccccacgccgtggaggccctggtgaagcagccccccgaccggtggctgtctaacgccagaatgacccactaccaggccctgctgctggacaccgaccgggtgcagttcggacccgtggtggccctgaaccccgccacactgctgcctctgcccgaggagggcctgcagcacaactgcctggacatcctggccgaggcccacggcacaaggcctgacctgaccgatcagcccctgcccgacgccgaccacacctggtacacagacggcagcagcctgctgcaggagggccagcgcaaggccggcgccgccgtgacaaccgagaccgaggtgatttgggccaaggccctgcccgccggcaccagcgcccagcgggccgagctgatcgccctgacccaggccctgaagatggccgagggcaagaagctgaacgtgtacaccgacagccgctacgccttcgccaccgcccacatccacggcgagatctacaggaggaggggctggctgaccagcgaggggaaggagatcaagaacaaggacgagatcctcgccctgctgaaggccctgttcctgcctaagagactgagcatcatccactgtcctggccaccagaagggccactcagccgaggcccggggaaatagaatggccgaccaggccgcccggaaggccgccatcaccgagaccccagacaccagcaccctgctgatcgaaaacagctcccccagcggcggcagcaagaggaccgccgatggcagcgagttcgagcccaaaaagaagaggaaggtgtga

SEQ ID NO: 438 - RNA, 2196 nt, synthetic construct
  misc_feature 1..2196: note = Description of Artificial Sequence: Synthetic polynucleotide
  source 1..2196: mol_type = other RNA
tccgggggctccagcggcgggtcctccggctccgagacccctggcacatctgagagcgccacccccgagtcctccggcggcagcagcggcggctctagcaccctgaacatcgaggacgagtacagactgcacgagacctccaaggagcccgacgtgtccctgggcagcacctggctgtccgacttcccccaggcctgggccgagaccggcggcatgggcctggcagtgaggcaggcccccctgatcatccccctgaaggccacaagcacccctgtgtccatcaagcagtaccccatgtcccaggaggccagactgggcatcaagcctcacatccagaggctgctggaccagggcatcctggtgccatgtcagtctccttggaacacccccctgctgcctgtgaagaagcccggcaccaacgactaccggccagtgcaggacctgcgggaggtgaacaagagggtggaggacatccaccctaccgtgcccaatccttacaacctgctgtccggcctgccccctagccaccagtggtacaccgtgctggatctgaaggacgccttcttctgcctgagactgcaccccacctctcagcccctgttcgccttcgagtggagggacccagagatgggcatctccggccagctgacctggaccagactgccccagggcttcaaaaactcccctaccctgttcaacgaggccctgcacagagacctggccgacttcaggatccagcaccccgacctgatcctgctgcagtacgtggacgatctgctgctggccgccaccagcgagctggactgccagcagggcacccgggccctgctgcagacactgggcaatctgggctacagggcctccgctaagaaggcccagatctgccagaagcaggtgaagtacctgggctacctgctgaaggagggccagagatggctgaccgaggcccggaaggagaccgtgatgggccagcccactccaaagacccccaggcagctgcgggagttcctgggcaaggccggcttctgccggctgttcatccccggcttcgccgagatggccgcccccctgtaccccctgaccaagcccggcaccctgttcaactggggccccgaccagcagaaggcctaccaggaaatcaagcaggccctgctgaccgcccctgccctgggcctgcccgatctgaccaagccattcgagctgttcgtggacgagaagcagggctacgccaagggcgtgctgacacagaagctgggaccctggcggaggcccgtggcctatctgtccaagaagctggatcccgtggccgccggctggcccccctgcctgcggatggtggccgccatcgccgtgctgaccaaggacgccggcaagctgaccatggggcagcctctggtgatcctggcccctcacgccgtggaggccctggtgaagcagccccccgacaggtggctgtccaatgccagaatgacccactaccaggccctgctgctggacaccgaccgggtgcagttcggccccgtggtggccctgaaccccgccacactgctgcccctgcctgaggagggcctgcagcacaactgcctggacatcctggccgaagcccacggcacccgccccgacctgaccgaccagcccctgccagacgccgaccacacctggtacaccgacggctccagcctgctgcaggagggccagaggaaggccggcgccgccgtgaccacagagacagaggtgatctgggccaaggccctgccagccggcactagcgcccagagggccgagctgatcgccctgacccaggccctgaagatggccgagggcaagaagctgaacgtgtacaccgactccaggtacgccttcgccaccgcccacatccacggcgagatctacagaaggagaggctggctgaccagcgagggcaaggagatcaagaacaaggatgagatcctggccctgctgaaggccctgttcctgcccaagagactgtccatcatccactgccctggccaccagaagggccactccgccgaggccaggggcaacagaatggccgaccaggccgccagaaaggccgccatcaccgagacccccgataccagcaccctgctgatcgagaactccagcccctccgggggcagcaagagaacagccgacggctccgagttcgagcccaagaagaagcgcaaggtgtga

SEQ ID NO: 439 - RNA, 2196 nt, synthetic construct
  misc_feature 1..2196: note = Description of Artificial Sequence: Synthetic polynucleotide
  source 1..2196: mol_type = other RNA
tccggcggcagctctggcggcagctccggcagcgaaaccccaggcaccagcgagagcgctacccccgagagctccggcggctccagcggcggcagctcaacactgaacatcgaggacgagtatcggctgcacgagacaagcaaggagcccgacgtgagcctgggcagcacctggctgtccgacttccctcaggcctgggccgagaccggaggcatgggcctggccgtgcgccaggcccccctgatcatccccctgaaggccacctccacccccgtgtccatcaagcagtaccccatgtctcaggaggccaggctgggaatcaagccccacatccagagactgctggaccagggcatcctggtgccttgccagagcccctggaacacccctctgctgcccgtgaagaagcccggcaccaatgactaccggcccgtgcaggacctgagggaggtgaacaagcgggtggaggacattcaccccaccgtgcctaacccctacaacctgctgagcgggctgcccccctcccaccagtggtataccgtgctggacctgaaggacgccttcttctgcctgaggctgcaccccacatcccagcccctgttcgccttcgagtggagagaccccgagatgggcatcagcggccagctgacatggaccaggctgcctcagggcttcaagaacagccccaccctgttcaacgaggccctgcaccgcgacctggccgacttcagaattcagcaccctgacctgatcctgctgcagtacgtggacgacctgctgctggccgccaccagcgagctggattgccagcagggcaccagagccctgctgcagaccctgggcaacctgggctacagggccagcgccaagaaggcccagatctgccagaagcaggtgaagtacctgggctacctgctgaaggagggccagaggtggctgaccgaggccaggaaggagaccgtgatgggccagcccacccccaagactccccggcagctgagagagttcctgggcaaggccggcttctgccggctgtttatcccaggcttcgccgagatggccgcccccctgtaccccctgaccaagcctggcactctgttcaactggggcccagatcagcagaaggcctaccaggagattaagcaggccctgctgaccgcccccgccctgggcctgccagacctgaccaagccattcgagctgttcgtggacgaaaaacagggctacgccaagggcgtgctgacccagaagctgggcccctggcggagacctgtggcctacctgtccaagaagctggaccccgtggccgccggatggcccccctgcctgagaatggtggccgccatcgccgtgctgaccaaggacgccggcaagctgaccatgggacagccactggtgatcctggccccccacgcagtggaggccctggtgaagcagccccccgacaggtggctgagcaacgccagaatgacccactatcaggccctgctgctggacaccgacagagtgcagttcggccccgtggtggccctgaaccccgccacactgctgcccctgcccgaggagggcctgcagcacaactgcctggatattctggccgaggcccacggcacccgccccgacctgaccgaccagcccctgcccgacgccgaccacacctggtacaccgacggctccagcctgctgcaggagggccagaggaaggccggcgccgccgtgaccaccgagaccgaggtgatttgggccaaggccctgcccgccggcaccagcgcccagagagccgagctgatcgccctgacccaggccctgaagatggccgagggcaagaagctgaacgtgtacaccgactccagatacgccttcgccaccgcccacatccacggcgagatttaccggagaagaggctggctgaccagcgagggcaaggagatcaaaaacaaggacgagatcctggccctgctgaaggccctgttcctgccaaagcggctgtccatcatccactgtcccggccaccagaagggccactccgccgaggcccggggcaacaggatggccgatcaggccgccagaaaagccgccatcaccgagacccccgacacctccaccctgctgatcgagaatagctccccatccggcggcagcaagagaaccgccgacggcagcgagttcgagcccaagaagaagagaaaggtgtga

SEQ ID NO: 440 - RNA, 2196 nt, synthetic construct
  misc_feature 1..2196: note = Description of Artificial Sequence: Synthetic polynucleotide
  source 1..2196: mol_type = other RNA
tccggcggcagcagcggcggctctagcggcagcgagacccctggcaccagcgagagcgccacccccgagagctccggcggctcttccggcggctccagcaccctgaacatcgaggacgagtaccgcctgcacgaaacaagcaaggagccagacgtgtccctggggagcacctggctgtccgacttcccccaggcctgggccgagaccggaggcatgggactggccgtgcggcaggcccccctgatcatccccctgaaagccacctccaccccagtgtccatcaagcagtaccccatgtcccaggaggccaggctgggcatcaagccccacatccagaggctgctggaccagggcatcctggtgccttgccagagcccatggaatacccccctgctgcccgtgaagaagcccggcaccaacgattaccggcctgtgcaggacctgcgggaggtgaataagagagtggaggacatccaccccaccgtgcccaacccttacaacctgctgagcggcctgcccccaagccaccagtggtacaccgtgctggacctgaaggacgccttcttctgcctgcggctgcaccccacaagccagcctctgttcgcctttgagtggagagaccccgagatgggcatttccggccagctgacctggacccgcctgccacagggctttaagaatagccccacactgttcaacgaggccctgcacagggacctggccgacttccgcatccagcaccccgacctgatcctgctgcagtacgtggacgacctgctgctggccgccacctctgagctggactgccagcagggcaccagagccctgctgcagacactgggaaacctgggctacagggccagcgccaagaaggcccagatctgccagaagcaggtgaagtacctgggctacctgctgaaggagggccagagatggctgaccgaggccaggaaggagaccgtgatggggcagcctacccccaagacccctaggcagctgcgcgagttcctgggcaaggccggcttctgcaggctgttcatccccggcttcgccgagatggccgcccccctgtaccctctgaccaagcccggcaccctgttcaactggggccccgaccagcagaaggcctaccaggagatcaagcaggccctgctgaccgcccccgccctggggctgccagacctgaccaagcctttcgagctgttcgtggacgagaagcagggatacgccaagggcgtgctgacccagaagctgggcccatggaggcggcccgtggcctacctgagcaagaagctggaccccgtggccgccggctggcccccatgcctgcggatggtggccgccatcgccgtgctgaccaaggacgccggcaagctgaccatgggccagccactggtgatcctggcccctcacgccgtggaggccctggtgaagcagccacccgacagatggctgtccaacgccaggatgacccactaccaggccctgctgctggacaccgacagggtgcagttcggccctgtggtggccctgaaccccgccaccctgctgcccctgcccgaggagggcctgcagcacaactgcctggacatcctggccgaggcccacggcaccagacccgatctgaccgaccagcccctgcccgacgccgatcacacctggtacaccgatgggtctagcctgctgcaggaaggccagaggaaggccggcgccgccgtgacaaccgagaccgaggtgatctgggccaaggccctgcctgccggcaccagcgcccagcgggccgaactgatcgccctgacccaggccctgaagatggccgaggggaagaagctgaacgtgtacaccgactcccggtacgccttcgccaccgcccacatccacggcgagatctatagaaggcgcggctggctgacctccgagggcaaggaaatcaagaacaaggacgagatcctggccctgctgaaggccctgttcctgcctaagagactgagcatcatccactgcccaggccatcagaagggccacagcgcagaggcccgcggaaacagaatggccgaccaggccgccaggaaggccgccatcaccgagaccccagacaccagcaccctgctgatcgagaatagcagccccagcggcggcagcaagagaaccgccgatggcagcgagttcgagcctaagaagaagcggaaggtgtga

SEQ ID NO: 441 - RNA, 2196 nt, synthetic construct
  misc_feature 1..2196: note = Description of Artificial Sequence: Synthetic polynucleotide
  source 1..2196: mol_type = other RNA
tccggcggcagcagcggcggctcctccggcagcgagacccccggcaccagcgagagcgccacccccgagagcagcggcggctcctccggcggctcttccacactgaacatcgaggacgagtaccggctgcacgagacctccaaggagcccgacgtgagcctgggcagcacctggctgtccgactttccccaggcctgggccgagaccggcggcatgggcctggccgtgaggcaggcccccctgatcatcccactgaaggccaccagcacccccgtgagcatcaagcagtacccaatgagccaggaggcccggctgggcatcaagcctcacatccagcgcctgctggaccaggggatcctggtgccctgccagagcccctggaacacacccctgctgcccgtgaagaagcccggcaccaacgactaccggcccgtgcaggatctgagggaggtgaataagcgggtggaggacatccaccccaccgtgcccaacccttacaacctgctgagcggcctgccccccagccaccagtggtacacagtgctggatctgaaggacgccttcttttgtctgcggctgcaccccaccagccagcccctgttcgccttcgagtggagagacccagagatgggcatcagcggccagctgacctggaccaggctgcctcagggcttcaaaaatagccccaccctgttcaacgaggccctgcacagggacctggccgacttcaggatccagcaccccgacctgattctgctgcagtacgtggacgacctgctgctggccgccaccagcgagctggactgccagcagggcacccgggccctgctgcagactctgggcaacctgggctacagggcctctgccaagaaggcccagatctgccagaagcaggtgaagtacctgggctacctgctgaaggagggccagaggtggctgaccgaggccagaaaggagaccgtgatgggccagcccacccccaagacccctagacagctgagggagttcctgggcaaggcaggcttctgtaggctgttcatccccggatttgccgagatggccgcccccctgtaccccctgaccaagccaggcaccctgtttaactggggccccgaccagcagaaggcctaccaggagatcaagcaggccctgctgaccgcccccgccctgggcctgcctgatctgacaaagccattcgagctgttcgtggacgagaagcagggctacgccaagggcgtgctgacacagaagctgggcccctggaggcggcccgtggcctacctgtccaagaagctggaccccgtggccgccggctggcctccttgcctgaggatggtggccgctatcgccgtgctgaccaaggacgccgggaagctgaccatgggccagcccctggtgatcctggcccctcacgccgtggaggccctggtgaagcagcctcccgacagatggctgtccaacgccaggatgacccactaccaggccctgctgctggacaccgaccgggtgcagtttggccctgtggtggccctgaacccagccaccctgctgcccctgcccgaggaggggctgcagcacaactgtctggacatcctggccgaggcccacggcaccagacccgacctgaccgaccagcccctgccagacgccgaccacacctggtacaccgatggatctagcctgctgcaggagggccagaggaaggccggcgccgccgtgaccaccgagaccgaggtgatctgggccaaggccctgcctgccggcacctccgcccagcgcgccgagctgatcgccctgacccaggccctgaagatggccgagggaaagaagctgaatgtgtacaccgacagcaggtacgccttcgccaccgcccacatccacggggagatctacagacggagaggctggctgaccagcgaaggcaaggagatcaagaacaaggacgagatcctggccctgctgaaggccctgttcctgcccaagcggctgtccatcatccactgtcccggccaccagaagggccacagcgccgaggcccggggcaatagaatggccgaccaggccgccaggaaggccgccatcaccgagactcctgacaccagcaccctgctgatcgagaactccagccccagcggcggcagcaagaggaccgccgacggcagcgagttcgagcccaagaagaagcgcaaggtgtga

SEQ ID NO: 442 - RNA, 2196 nt, synthetic construct
  misc_feature 1..2196: note = Description of Artificial Sequence: Synthetic polynucleotide
  source 1..2196: mol_type = other RNA
tccggcggcagcagcggcggctcttccggcagcgagaccccaggcacctccgagagcgccaccccagagtccagcggcggctccagcggcggcagctccaccctgaacatcgaggacgagtacaggctgcacgagaccagcaaggagccagacgtgagcctgggcagcacctggctgagcgatttcccccaggcctgggccgagactggcggcatgggcctggccgtgcggcaggcccccctgatcatcccactgaaggccacctccacccccgtgagcatcaagcagtaccccatgtcccaggaggcccggctgggcattaagccccacatccagcggctgctggaccagggcatcctggtgccctgccagtccccatggaacacccccctgctgcccgtgaagaagcccggcaccaacgattatagacccgtgcaggacctgagagaggtgaataagagagtggaggacatccaccctaccgtgccaaacccttacaacctgctgagcggcctgcccccctcccaccagtggtacaccgtgctggacctgaaggatgccttcttctgcctgagactgcaccccaccagccagcccctgtttgccttcgagtggagggaccccgagatgggcatcagcggccagctgacatggaccagactgcctcagggcttcaagaactcacccaccctgttcaacgaggccctgcacagagacctggccgactttagaatccagcaccccgatctgatcctgctgcagtacgtggacgacctgctgctggccgccaccagcgagctggactgccagcagggcacaagggccctgctgcagaccctgggcaacctgggctacagagccagcgccaagaaggcccagatctgccagaagcaggtgaaatacctgggctacctgctgaaagagggccagagatggctgaccgaggccaggaaggagaccgtgatgggccagcccaccccaaagacacctaggcagctgcgggagttcctgggcaaggccggcttctgcaggctgttcatccccggcttcgccgagatggccgccccactgtacccactgaccaagcctggcaccctgttcaactggggccccgatcagcagaaggcctaccaggagatcaagcaggccctgctgaccgcccccgccctgggcctgcccgacctgaccaagcccttcgaactgttcgtggacgagaagcagggctacgccaagggcgtgctgacccagaagctgggcccttggagacgcccagtggcctatctgtccaagaagctggatcccgtggccgctggatggcccccatgcctgcggatggtggccgccatcgccgtgctgaccaaggacgccggcaagctgaccatgggccagcccctggtgatcctggccccccacgccgtggaggccctggtgaagcagccacctgacaggtggctgagcaacgccagaatgacccactaccaggccctgctgctggataccgacagagtgcagttcggccctgtggtggccctgaaccccgccaccctgctgcctctgcccgaggagggcctgcagcacaactgcctggacattctggccgaggcccacggcaccaggcccgacctgaccgatcagccactgcccgacgccgaccacacctggtacaccgatggcagcagcctgctgcaggaaggccagcggaaggccggcgccgccgtgacaaccgagaccgaggtgatctgggccaaggccctgcctgccggaaccagcgcccagagggccgagctgatcgccctgacccaggccctgaagatggccgagggcaagaaactgaacgtgtacaccgacagcaggtacgccttcgccaccgcccacatccacggcgagatctacagaaggagaggctggctgactagcgagggcaaggagatcaagaacaaggacgagatcctggccctgctgaaggccctgttcctgccaaagagactgtccatcatccactgccctggccaccagaagggccactccgccgaggccagaggcaacaggatggccgaccaggccgccaggaaggccgccatcaccgagacaccagacaccagcaccctgctgatcgagaatagctccccctccggcggcagcaagaggactgccgacggcagcgagttcgagcccaagaagaagagaaaggtgtga

SEQ ID NO: 443 - RNA, 2196 nt, synthetic construct
  misc_feature 1..2196: note = Description of Artificial Sequence: Synthetic polynucleotide
  source 1..2196: mol_type = other RNA
agcggcggaagcagcgggggcagcagcggatctgagacccccggcacctccgagagcgccaccccagagtccagcggcggcagctccggcggcagcagcaccctgaacatcgaggacgagtacaggctgcacgagaccagcaaggagcccgacgtgtccctgggcagcacctggctgtccgacttcccccaggcctgggccgagaccggcggcatgggcctggccgtgcggcaggccccactgattattcctctgaaggccacaagcacccccgtgtctatcaagcagtacccaatgtcccaggaggccagactgggcatcaagccccacattcagcgcctgctggaccagggcatcctggtgccctgccagtctccctggaacacccccctgctgcccgtgaagaagcctgggaccaacgactacagacccgtgcaggacctgagggaggtgaacaagcgggtggaggacatccaccctaccgtgcccaacccctacaatctgctgagcggcctgccaccctcccaccagtggtacaccgtgctggacctgaaggacgccttcttctgcctgaggctgcaccccaccagccagccactgttcgccttcgagtggagagacccagagatgggcatcagcggccagctgacctggaccaggctgccccagggcttcaagaacagccccaccctgtttaacgaggccctgcacagagacctggccgacttccgcatccagcaccccgacctgatcctgctgcagtacgtggacgacctgctgctggccgccaccagcgagctggactgccagcagggcaccagagccctgctgcagacactgggcaatctgggctatcgcgccagcgccaagaaggcccagatctgccagaagcaggtgaagtacctgggctacctgctgaaggagggccagcggtggctgaccgaggcccggaaggagaccgtgatggggcagcctacacccaagacccctagacagctgcgcgagttcctgggaaaggccggcttctgcagactgttcatccctggcttcgccgagatggccgcccctctgtaccctctgactaagccaggcacactgttcaactggggccccgaccagcagaaggcctaccaggagatcaagcaggccctgctgaccgctcctgccctgggcctgcccgatctgaccaagcccttcgagctgttcgtggacgagaagcaggggtacgccaagggcgtgctgacccagaagctgggcccttggagacggcccgtggcctacctgagcaagaagctggatcccgtggccgccggctggcccccctgcctgaggatggtggccgccatcgccgtgctgaccaaggacgccggcaagctgaccatgggccagcccctggtgattctggccccccacgccgtggaggccctggtgaagcagccccctgacagatggctgtccaacgccaggatgacccattaccaggccctgctgctggacaccgaccgcgtgcagttcggccccgtggtggccctgaacccagccaccctgctgcccctgcccgaggagggcctgcagcacaattgcctggacatcctggccgaggcccacggcacccggcccgacctgaccgaccagcctctgcccgacgccgatcacacctggtacaccgacggcagcagcctgctgcaggagggccagaggaaggccggcgctgccgtgaccaccgagaccgaggtgatttgggccaaggccctgccagccggcaccagcgcccagagagccgagctgatcgccctcacccaggccctgaagatggccgagggcaagaagctgaacgtgtacaccgatagcaggtacgccttcgccaccgcccacatccacggcgagatctacaggaggagggggtggctgacctccgagggcaaggagatcaagaataaggacgagatcctggccctgctgaaggccctgtttctgcccaagagactgagcatcatccactgtcccggccaccagaagggccacagcgccgaggccaggggcaatcggatggccgatcaggccgcccggaaggccgccatcaccgagaccccagacacctctaccctgctgatcgagaactcctcccccagcggcggcagcaagagaaccgccgacggctccgagttcgagcccaagaagaagagaaaggtgtga

SEQ ID NO: 444 - RNA, 2196 nt, synthetic construct
  misc_feature 1..2196: note = Description of Artificial Sequence: Synthetic polynucleotide
  source 1..2196: mol_type = other RNA
agcggcggcagcagcggcggcagctccggcagcgagacccctggcaccagcgagagcgccacccccgagagctccggcggcagctctggcggcagcagcaccctgaacatcgaggacgagtacaggctgcacgagacctccaaggagcccgacgtgtctctgggctccacttggctgtccgatttcccccaggcctgggccgagaccggcggcatgggcctggccgtgcggcaggccccactgatcatccccctgaaagccacctccacacccgtgtccattaagcagtaccctatgtcccaggaggccaggctgggcatcaagccccacatacagagactgctggaccagggcatcctggtgccatgccagagcccttggaacacccccctgctgcctgtgaagaagcctggcaccaatgactaccgccccgtgcaggacctgagagaggtgaataagagggtggaggacatccaccctaccgtgcccaacccttacaatctgctgtccggcctgccccccagccaccagtggtacaccgtgctggacctgaaggacgccttcttctgcctgcggctgcaccccaccagccagcccctgttcgccttcgagtggagagaccccgagatgggcatctccggccagctgacctggaccaggctgcctcagggcttcaagaacagcccaaccctgttcaacgaggccctgcatagagacctcgccgactttcggatccagcacccagacctgatcctgctgcagtatgtggacgacctgctgctggccgccaccagcgagctggactgccagcagggcaccagggctctgctgcagaccctgggcaacctgggctaccgcgccagcgccaagaaggcccagatctgccagaagcaggtgaagtacctgggctacctgctgaaggagggccagcgctggctgaccgaggccagaaaggagaccgtgatgggccagcctacccccaagaccccccggcagctgcgggagtttctgggcaaggccggcttctgcaggctgttcattcctggcttcgccgagatggccgcccccctgtaccccctgaccaagcccggcaccctgttcaattggggccccgatcagcagaaggcctaccaggagatcaagcaggccctgctgaccgccccagccctgggtctgcccgacctgaccaagcctttcgagctgttcgtggacgagaagcagggctacgccaagggcgtgctgacccagaagctgggaccctggcggagacccgtggcctacctgtctaaaaagctggacccagtggccgccggctggcccccttgcctgcgcatggtggccgccatcgccgtgctgaccaaagacgccggcaagctgaccatgggccagcccctggtgatcctggcccctcacgccgtggaggccctggtgaagcagccacccgacaggtggctgtccaacgcccgcatgacccactatcaggccctgctgctggacaccgacagagtgcagttcggccccgtggtggccctgaaccccgccaccctgctgcccctgcccgaggagggcctgcagcacaactgcctggacatcctggccgaggcccacggcacccgccctgacctgaccgaccagcccctgccagacgccgaccacacctggtacaccgacggcagctccctgctgcaggagggccagcggaaggccggcgccgccgtgaccaccgagaccgaggtgatctgggccaaggccctgccagccggcaccagcgcccagagagccgagctgatcgccctgacccaggccctgaagatggccgagggcaagaagctgaacgtgtacaccgacagcagatacgccttcgccacagcccacatccacggcgagatctacagaaggagaggctggctgaccagcgagggcaaggagatcaagaataaggacgagatcctggccctgctgaaggccctgttcctgcctaagcggctgagcatcatccactgccccggccaccagaagggccacagcgccgaggccaggggcaacagaatggccgaccaggccgccaggaaggccgccatcaccgagaccccagatacctccaccctgctgatcgagaacagctcccccagcggcggctccaagagaaccgccgacggcagcgagttcgagcccaagaagaagaggaaagtgtga

SEQ ID NO: 445 - RNA, 2196 nt, synthetic construct
  misc_feature 1..2196: note = Description of Artificial Sequence: Synthetic polynucleotide
  source 1..2196: mol_type = other RNA
agcggcggcagctccggcggctccagcggcagcgagacccccggcaccagcgagagcgccacccccgagagcagcggcggcagcagcggcggctcctccaccctgaacatcgaggacgagtaccggctgcacgagaccagcaaggagcccgacgtgtccctgggcagcacctggctgtccgacttccctcaggcctgggccgagaccggcggcatgggcctggctgtgaggcaggcccccctgatcatccccctgaaggccacatccacacccgtgtccatcaagcagtaccctatgtctcaggaggccagactgggcattaaaccccacatccagaggctgctggaccagggcatcctggtgccctgccagtctccctggaatacccctctgctgcccgtgaagaagcctggcaccaacgactacagacccgtgcaggacctgcgcgaggtgaacaagagagtggaggacatccacccaaccgtgccaaacccatataacctgctgtctggcctgccaccttcccaccagtggtacaccgtgctggacctgaaagacgccttcttctgcctgcggctccaccccacctcccagcccctgttcgccttcgagtggagggacccagagatgggcatcagcggccagctgacctggacccggctgcctcagggcttcaagaactcccccaccctgtttaacgaagccctgcacagggatctggccgactttagaatccagcaccccgatctgatcctgctgcagtacgtggacgacctgctgctggccgccaccagcgaactggattgccagcagggcaccagagccctgctgcagaccctgggcaacctggggtacagggccagcgccaagaaggcccagatctgccagaagcaggtgaagtacctgggctacctgctgaaggagggccagagatggctgaccgaggccagaaaagagacagtgatgggccagcccacacccaagaccccaagacagctgcgcgagttcctgggcaaggccggcttctgccggctgttcatccctggattcgccgagatggccgcccccctgtaccccctgaccaagcccggcaccctgttcaactggggccccgaccagcagaaggcctaccaggagatcaagcaggccctgctgaccgcccccgccctgggcctgcccgacctgacaaagcctttcgagctgttcgtggacgagaagcagggctacgccaagggcgtgctgacccagaagctgggcccatggcggaggcccgtggcctacctgtccaagaagctggaccccgtggccgccggctggcccccctgcctgaggatggtggccgccatcgccgtgctgaccaaggacgccggaaagctgaccatgggccagccactggtgatcctggccccccacgccgtggaggccctggtgaagcagccccccgaccggtggctgtccaatgccaggatgacccactaccaggccctgctgctggacaccgacagagtgcagttcggccccgtggtggccctgaaccccgccaccctgctgcctctgcccgaggagggcctgcagcacaactgcctggacatcctggccgaggcccacggcaccaggcccgacctgacagaccagcccctgcccgacgccgaccacacctggtacaccgatggcagctccctgctgcaggagggccagagaaaggccggcgccgccgtgacaaccgagaccgaggtgatctgggccaaggccctgcccgccggcacctccgcccagcgggccgagctgatcgccctgacccaggccctgaagatggccgagggcaagaagctgaacgtgtacaccgacagccggtacgccttcgccaccgcccacatccacggcgagatctaccggcggaggggctggctgacctccgagggcaaggagatcaagaacaaggacgagatcctggccctgctgaaggccctgttcctgcccaagaggctgtccatcatccactgtccaggccaccagaagggccattccgccgaggccaggggcaacaggatggccgaccaggccgccagaaaggccgccatcacagagacccccgacacctctacactgctgatcgagaacagtagccctagcggcggaagcaagagaaccgccgacggcagcgagttcgagcccaagaagaagagaaaggtgtga

SEQ ID NO: 446 - RNA, 2196 nt, synthetic construct
  misc_feature 1..2196: note = Description of Artificial Sequence: Synthetic polynucleotide
  source 1..2196: mol_type = other RNA
agcggcggcagcagcggcggcagcagcggcagcgagacccccggcacctccgagagcgccacccccgagagcagcgggggctccagcggcggcagctctaccctgaacatcgaggacgagtaccgcctgcacgagaccagcaaggagcccgacgtgagcctgggcagcacctggctgtccgactttccccaggcctgggccgagaccggaggcatgggcctggccgtgcggcaggccccactgatcatccctctgaaggccaccagcacccctgtgagcatcaagcagtaccccatgtctcaggaggccaggctgggcattaagccacacatccagcggctgctggatcagggcatcctggtgccatgccagtccccctggaacacccctctgctgcccgtgaagaagcccggcaccaacgactacagacccgtgcaggacctgagagaggtgaacaagagggtggaggacatccaccccaccgtgcccaacccctacaacctgctgtccggcctgccccctagccaccagtggtacaccgtgctggacctgaaggacgccttcttctgcctgcgcctgcaccccaccagccagccactgttcgccttcgagtggagagaccccgagatggggattagcgggcagctgacctggaccagactgcctcagggcttcaaaaacagccccaccctgttcaacgaggccctgcacagggacctggccgacttcagaatccagcaccccgacctgatcctgctgcagtacgtggacgacctgctgctggctgccaccagcgagctggactgccagcagggcaccagggccctgctgcagaccctgggcaatctgggctaccgggccagcgccaagaaagcccagatctgccagaagcaggtgaagtacctgggctacctgctgaaagagggccagagatggctgaccgaggcccggaaggagaccgtgatgggccagcccacacccaagaccccaaggcagctgagggagtttctgggcaaggccggcttttgcagactgtttatccccgggttcgccgagatggccgcccccctgtaccccctgacaaagccaggcaccctgttcaactggggccccgaccagcagaaggcctaccaggagatcaagcaggccctgctgaccgcccctgccctgggcctgcccgacctgaccaagcccttcgagctgttcgtggacgagaagcagggctacgccaagggcgtgctgacccagaagctgggcccctggcggagacccgtggcctacctgtctaaaaagctggacccagtggccgccggctggccaccatgcctgagaatggtggccgccatcgccgtgctgaccaaggatgccggcaagctgaccatgggccagccactggtgatcctggccccacacgccgtggaggccctggtgaagcagccccccgacaggtggctgtccaatgccaggatgacccactaccaggccctgctgctggacaccgatagggtgcagttcggccccgtggtggccctgaaccctgccaccctgctgcccctgcccgaggagggcctgcagcacaactgcctggacatcctggccgaggcccacggcacaaggcccgacctgacagaccagcccctgcccgacgccgaccacacctggtacaccgacggctcctctctgctgcaggagggccagagaaaggccggcgccgcagtgaccaccgagaccgaggtgatctgggccaaggccctgcctgccggcaccagcgcccagcgggccgaactgatcgccctgacccaggccctgaagatggccgagggcaaaaagctgaacgtgtataccgattctaggtatgccttcgccaccgcccatatccacggcgagatctacagaagaagaggctggctgaccagcgagggcaaggagatcaagaataaggacgagatcctggccctgctgaaggccctgttcctgccaaagaggctgagcatcatccactgtcccggccaccagaagggccacagcgccgaggccaggggcaacagaatggccgaccaggccgccaggaaggccgccatcaccgagacccccgacacctccaccctgctgatcgagaacagctccccctctggcggcagcaagaggaccgccgacggcagcgagttcgagcccaagaagaagcggaaggtgtga

SEQ ID NO: 447 - RNA, 2196 nt, synthetic construct
  misc_feature 1..2196: note = Description of Artificial Sequence: Synthetic polynucleotide
  source 1..2196: mol_type = other RNA
tccggcggctccagcggcggcagcagcggcagcgagacccccggcaccagcgagagcgccaccccagagagctccggcggcagcagcggcggcagcagcaccctgaacatcgaggacgagtacaggctgcacgagaccagcaaggagcccgacgtgagcctgggcagcacctggctgagcgatttccctcaggcttgggccgagaccggcggcatgggcctggccgtgcggcaggcccccctgattatccccctgaaggccaccagcacccccgtgagcatcaagcagtacccaatgtcccaggaggccaggctgggcatcaagcctcacatccagaggctgctggaccagggcatcctggtgccatgccagtccccctggaacacccctctgctgcccgtgaagaagcctggcaccaacgactaccggcccgtgcaggacctgagagaagtgaacaagcgggtggaggacatccacccaaccgtgcccaacccttacaacctgctgtccggcctgccccccagccaccagtggtacaccgtgctggacctgaaggacgccttcttctgcctgagactgcaccccacctctcagcccctgttcgccttcgagtggcgcgaccccgagatgggcatcagcggccagctgacctggaccagactgccacagggctttaagaatagcccaaccctgtttaacgaggccctgcacagggacctggccgacttcaggatccagcaccccgacctgattctgctgcagtacgtggacgacctgctgctggccgctaccagcgagctggactgccagcagggcaccagagccctgctgcagaccctgggcaacctgggctacagagccagcgccaagaaggcccagatctgtcagaagcaggtgaagtatctgggctacctgctgaaggaaggccagagatggctgaccgaggccagaaaggagactgtgatgggccagcccacccccaagacccccaggcagctgcgggagttcctgggcaaggccggcttttgcagactgtttatccctggcttcgccgagatggccgccccactgtaccctctgaccaagcctggcaccctgtttaactggggccccgaccagcagaaggcctaccaggagatcaagcaggccctgctgaccgcccccgccctgggcctgcccgacctgaccaagcctttcgagctgttcgtggacgagaagcagggatacgccaaaggcgtgctgacccagaagctgggcccctggcggaggcccgtggcctacctgagcaaaaaactggaccctgtggccgccggctggcccccatgcctgcggatggtggccgccatcgctgtgctgaccaaggacgccggcaagctgaccatgggccagcccctggtgatcctggcccctcacgccgtggaggctctggtgaagcagcctccagacaggtggctgtccaacgccaggatgacccactaccaggccctgctgctggacaccgaccgggtgcagttcggccctgtggtggccctgaaccccgccaccctgctgcctctgccagaggagggcctgcagcacaactgcctggacatcctggccgaggcccacggcaccaggcccgacctgaccgaccagcccctgcctgacgccgaccacacctggtacaccgacggcagctccctgctgcaggagggccagaggaaggccggcgccgccgtgaccaccgagaccgaggtgatctgggccaaagccctgcctgccggcacctccgcccagcgggccgagctgatcgccctgacccaggccctgaagatggctgagggcaagaagctgaacgtgtacaccgattccagatacgccttcgccaccgcccacatccacggcgagatctacagaagaaggggctggctgacctccgagggcaaggagatcaagaacaaggacgagattctggccctgctgaaggccctgttcctgcctaagagactgagcatcatccactgtcccggccaccagaagggccacagcgccgaggccagaggcaatagaatggccgaccaggccgccagaaaggccgccatcaccgagacccccgacaccagcaccctgctgatcgagaacagcagccccagcggcggctccaaacgcaccgccgacgggagcgagttcgagcccaagaagaagaggaaagtgtga

SEQ ID NO: 448 - RNA, 2196 nt, synthetic construct
  misc_feature 1..2196: note = Description of Artificial Sequence: Synthetic polynucleotide
  source 1..2196: mol_type = other RNA
tctggcggcagctctggcggttccagcgggtccgagacccctggaaccagcgagagcgccacccccgagagcagcggcggcagctccgggggctccagcaccctgaacatcgaggacgagtacaggctgcacgagaccagcaaggagcctgacgtgagtctgggcagcacctggctgtccgacttccctcaggcttgggccgagaccggggggatgggcctggccgtgcgccaggcccccctgatcatccccctgaaggccacctccaccccggtgagcatcaagcagtaccccatgtcccaggaggcccggctgggcatcaagccccacatccagcggctgctggatcaggggatcctggtgccctgccagagcccctggaacaccccactgctgcctgtgaagaagccaggcaccaacgactatcggcccgtgcaggacctgcgggaggtgaataagagggtggaggacatccaccctaccgtgcccaacccttacaacctcctgtcaggcctgccacccagccatcagtggtacaccgtgctggacctgaaggatgccttcttctgcctgcggctgcaccccaccagccagcccctgttcgccttcgagtggagagacccagagatggggatctccgggcagctgacctggacccggctgccccagggcttcaagaacagccccaccctgttcaatgaggccctgcacagggacctggcagacttcaggatccagcaccctgacctgatcctgctgcagtacgtggacgacctgctgctggcagccacctctgagctggactgccagcagggcaccagagccctgctgcagaccctgggcaacctgggctacagggcctccgccaagaaggcccagatctgccagaagcaggtgaagtacctgggctatctgctgaaggagggccagaggtggctgaccgaggccaggaaggagacagtgatggggcagccaacccccaagacccccaggcagctgagggagtttctggggaaggccggcttctgccggctgttcatccccggcttcgccgagatggctgccccactgtatcccctgaccaagcctggcaccctgttcaattgggggccagaccagcagaaggcttatcaggagatcaagcaggccctgctgaccgccccagccctgggcctgcctgacctgactaagcctttcgagctgtttgtggacgagaagcagggctacgccaagggcgtgctgacccagaagctgggcccttggcggaggcccgtggcctacctgtccaagaagctggaccccgtggcagccggctggcctccttgtctgcgcatggtggccgccatcgctgtgctgaccaaggacgccggcaagctgaccatgggccagcctctggtcatcctggccccacacgccgtggaggccctggtgaagcagccacctgacaggtggctgtccaacgccaggatgacccactaccaggccctgcttctcgacacagacagggtgcagttcggccccgtggtggccctgaaccccgccactctgctgcccctccccgaggaggggctgcagcacaactgtctggacattctggccgaggcccacggcactcggccagacctgacagaccagcccctgcccgacgccgaccacacctggtacaccgacggcagcagcctgctgcaggagggccagcggaaggccggggccgccgtgaccaccgagaccgaggtgatctgggccaaggccctgcccgccggcacctccgcccagagggccgagctgatcgccctgacccaggccctgaagatggccgagggcaagaagctgaacgtgtataccgacagccgctacgccttcgccaccgcccacatccacggcgagatctacaggcgcaggggctggctgaccagcgagggcaaggagatcaagaacaaggatgagatcctggccctgctgaaggccctgttcctgcccaagcggctgtccattatacactgccccggccatcagaagggccactctgctgaggcccgggggaatcggatggccgaccaggccgccaggaaggccgccatcaccgagacccccgacaccagcaccctgctgatcgagaactcctcccccagcggcggctccaagcggaccgccgacgggagcgagttcgagccaaagaagaagaggaaggtgtga

SEQ ID NO: 449 - RNA, 2196 nt, synthetic construct
  misc_feature 1..2196: note = Description of Artificial Sequence: Synthetic polynucleotide
  source 1..2196: mol_type = other RNA
agcggcgggagctctggtggcagctctgggagcgagactcctggcaccagcgagtccgccaccccagagagctctgggggaagctcaggcggctccagcaccctgaacatcgaggacgagtacaggctgcacgagaccagcaaggagcccgacgtgagtctgggctccacctggctgtctgacttcccccaggcctgggccgagaccggggggatgggcctggccgtgcgccaggcccccctgatcatccccctgaaggccaccagcactcccgtgagcatcaagcagtaccctatgagccaggaggccaggctgggcatcaagccccacatccagaggctgctggaccagggcatcctggtgccctgccagagcccctggaacaccccactgctgccagtgaagaagcctggcaccaacgactacaggcctgtgcaggacctgagggaggtgaacaagagggtggaggacatccaccctactgtgcctaacccttacaacctgctgtccggcctgcctcctagccaccagtggtacaccgtgctggacctgaaggacgccttcttctgtctgcggctgcatcccacatctcagcctctgttcgccttcgaatggagggaccctgagatggggatcagcggccagctgacctggaccaggctccctcagggcttcaagaacagccccaccctgttcaatgaggccctgcacagggacctggccgacttcaggatccagcaccccgacctcatcctgctgcagtacgtggacgacctgctgctggccgctaccagcgagctggactgccagcagggcaccagagccctgctgcagaccctgggaaatctgggctatcgggccagcgccaagaaggcccagatttgccagaagcaggtgaagtacctgggctacctgctgaaggagggacagaggtggctgaccgaggccaggaaggagaccgtgatgggccagcctaccccaaagactccccggcagctgcgggagtttctggggaaggctggcttctgccggctcttcattcctggcttcgccgagatggcagcccctctgtaccctctgaccaagccaggcaccctgttcaactggggcccagaccagcagaaggcctatcaggagatcaagcaggccctgctgaccgccccagccctgggcctgcctgacctgaccaagcccttcgagctgtttgtggacgagaagcagggctacgccaagggcgtgctgacccagaagctgggcccttggcggaggcccgtggcctacctgtccaagaagctggaccccgtggccgccggctggccaccatgcctgcgcatggtggccgccatcgccgtgctgaccaaggacgccgggaagctgaccatgggtcagcccctggtgatcctggctccgcacgccgtggaggccctggtgaagcagccaccagaccggtggctgtccaacgccaggatgacccactaccaggccctgcttctcgacacagacagggtgcagttcggcccagtggtggccctgaaccccgccaccctgctgcctctgccagaggagggcctgcagcacaactgcctggacattctggcagaggcccacggcacccggcctgacctgaccgaccagcccctgcccgacgctgaccacacctggtacaccgacggcagcagcctgctgcaggagggtcagaggaaggccggggccgccgtgaccaccgagaccgaggtgatctgggccaaggccctgcccgcagggacctccgcccagagggccgagctgatcgccctgacccaggccctgaagatggccgagggcaagaagctgaacgtgtacaccgacagccggtacgccttcgccaccgcccacatccacggcgagatctacaggcgcaggggctggctgaccagcgagggcaaggagatcaagaacaaggacgagatcctggccctgctgaaggccctgttcctgcccaagcgcctgtccatcatccactgccccggccatcagaagggccacagcgccgaggccaggggtaacaggatggccgaccaggccgccaggaaggccgccatcactgagacccctgacaccagcaccctgctgatcgagaactcctcccccagcggcggctccaagcggaccgccgacgggagcgagttcgagcccaagaagaagcggaaggtgtga

SEQ ID NO: 450 - RNA, 2196 nt, synthetic construct
  misc_feature 1..2196: note = Description of Artificial Sequence: Synthetic polynucleotide
  source 1..2196: mol_type = other RNA
agcggggggtccagcggcggcagcagcggcagcgagacccccggcaccagcgagagcgccacccccgagtctagcggcggctccagcggcggcagctccaccctgaacatcgaggacgagtaccgcctgcacgagaccagcaaggagcccgacgtgagtctgggctccacctggctgagcgactttcctcaggcctgggccgagaccgggggcatgggcctggctgtgcggcaggcccctctgatcatcccactgaaggccaccagcaccccagtgagcatcaagcagtaccccatgtcccaggaggcccggctgggcatcaagccccacatccagcggctgctggatcaggggatcctggtgccctgccagagcccctggaacacccccctgctgcctgtgaagaagccaggcaccaacgactaccgccccgtgcaggacctgcgcgaggtgaacaagagggtggaggacatccaccctaccgtgcctaatccttacaacctgctgagcggcctgccacccagccatcagtggtacacggtgctggacctgaaggatgcctttttctgtctgcggctgcaccccaccagccagccactgttcgccttcgagtggcgggatcccgagatggggatctccgggcagctgacctggacccggctgccccagggcttcaagaacagccccacgctgttcaatgaggccctgcacagagacctggcagacttcaggatccagcaccctgacctgatcctgctgcagtacgtggacgatctgctgctggccgccaccagcgagctggactgccagcagggcaccagagccctgctgcagaccctgggaaatctgggctatcgggccagcgccaagaaggcccagatttgccagaagcaggtgaagtacctgggctacctgctgaaggaggggcagcgctggctcaccgaggctcggaaggagaccgtgatgggccagcctacccctaagacccccaggcagctgagggagttcctggggaaggccggcttctgcagactgttcatccccggcttcgccgagatggccgccccactgtaccccctgaccaagcctggcaccctgttcaactggggccccgaccagcagaaggcttatcaggagatcaagcaggccctgctgaccgccccagccctgggcctgcctgacctgactaagcctttcgagctgttcgtggacgagaagcagggctacgccaagggcgtgctgacccagaagctgggcccttggcggcgcccggtggcctacctgtccaagaagctggaccccgtggccgccgggtggcctccatgcctgcggatggtggccgccatcgccgtgctgaccaaggacgctggcaagctgaccatgggccagccactggtgatcctggccccacacgccgtggaggccctggtgaagcagccaccagacaggtggctgtccaacgccaggatgacccactaccaggccctgctgctcgacaccgacagggtgcagttcggccccgtggtggccctgaaccccgccaccctgctgcccctgcccgaggagggcctgcagcacaactgcctggacatcctggcagaggcccacggcaccaggcccgacctgaccgaccagcctctgccagatgccgaccacacctggtacaccgacggcagttccctgctgcaggaggggcagcggaaggccggggccgccgtgaccaccgagaccgaggtgatctgggccaaggccctgcctgccggcacctccgcccagagggccgagctgatcgccctgacccaggccctgaagatggccgagggcaagaagctgaacgtgtacactgacagcaggtacgccttcgccaccgcccacatccacggcgagatctacaggaggaggggctggctgaccagcgagggcaaggagatcaagaacaaggacgagatcctggccctgctgaaggccctgttcctccccaagaggctgagcatcatccactgccccggccatcagaagggccacagcgccgaggccaggggcaatcggatggccgaccaggccgccagaaaggccgccatcaccgagacccctgacacctccaccctgctcatcgagaacagctcccccagcggcgggagcaagcgcaccgccgacgggagcgagttcgagccaaagaagaagaggaaggtgtga

SEQ ID NO: 451 - RNA, 2196 nt, synthetic construct
  misc_feature 1..2196: note = Description of Artificial Sequence: Synthetic polynucleotide
  source 1..2196: mol_type = other RNA
tctgggggaagcagcggcggcagcagcggctcagagacaccgggcaccagcgagtctgccacccccgagagctccggcgggagctccggggggagcagcaccctgaacatcgaggacgagtacaggctgcacgagaccagcaaggagcccgacgtgtctctgggcagcacctggctgtccgacttcccccaggcctgggccgagacaggcggcatgggcctggccgtgcgccaggcccccctgatcatccccctgaaggccaccagcacccctgtgtccatcaagcagtaccccatgtcccaggaggctcggctgggcatcaagccccacatccagcggctgctggatcaggggatcctggtgccctgccagagcccctggaacaccccactgctgcctgtgaagaagccaggcaccaacgactacaggcccgtgcaggacctcagggaggtgaacaagagggtggaggacatccaccctaccgtgcccaacccctacaacctgctgtcaggtctgccccccagccaccagtggtacaccgtgctggacctgaaggatgcctttttctgcctgcggctgcaccccaccagccagccactgttcgccttcgagtggcgcgacccagagatgggcatcagcggccagctgacctggacccggctgccccagggcttcaagaacagccccaccctgttcaatgaggccctgcaccgggacctggccgacttcaggatccagcacccagacctgatcctgctgcagtatgtggacgacctgctgctggccgccaccagcgagctggactgccagcagggcaccagagccctgctgcagaccctgggcaatctggggtacagggcctccgccaagaaggcccagatctgccagaagcaggtgaagtatctgggctatctgctgaaggagggccagcggtggctcaccgaggccaggaaggagaccgtcatgggccagcctaccccaaagacccccaggcagctgagggagtttctggggaaggctggcttctgtcggctgttcattcctggcttcgctgagatggccgcccccctgtaccccctgaccaagcccgggaccctgttcaactggggccccgaccagcagaaggcctatcaggagatcaagcaggccctgctgaccgccccagccctgggcctgcctgacctgaccaagcccttcgagctgttcgtggacgagaagcagggctacgccaagggcgtgctgacccagaagctgggcccttggcggaggcccgtggcctacctgagcaagaagctggaccccgtggcagccggctggcctccttgcctgaggatggtggccgccatcgccgtcctcaccaaggacgccggcaagctgaccatgggccagcctctggtcatcctggccccacacgccgtggaggccctggtgaagcagccacctgacaggtggctgtccaacgccaggatgacccactaccaggccctgctgctggacaccgacagggtgcagttcggccctgtggtggccctgaaccccgccacactgctgcctctgcccgaggaggggctgcagcacaactgtctggacattctggccgaggcccacggcactcggccagacctgacagaccagcccctccccgacgccgaccacacctggtacacagacggcagcagcctgctgcaggagggccagcggaaggccggggccgccgtgaccaccgagaccgaggtgatctgggccaaggccctgcccgctggcacctccgcccagcgggccgagctgatcgccctgacccaggccctgaagatggccgagggcaagaagctgaatgtgtacaccgacagccgctacgccttcgccaccgcccacatccacggcgagatctacaggaggaggggctggctgaccagcgagggcaaggagatcaagaacaaggatgagatcctggccctgctgaaggccctgttcctccccaagcggctgtccatcattcattgccccggccatcagaagggccacagtgccgaggcccgggggaatcggatggccgaccaggccgccaggaaggccgccatcaccgagacccccgacaccagcaccctgctgatcgagaactcctcccccagcggcggctccaagaggaccgccgacgggagcgagttcgagcccaagaagaagcggaaggtgtga

SEQ ID NO: 452 - RNA, 2196 nt, synthetic construct
  misc_feature 1..2196: note = Description of Artificial Sequence: Synthetic polynucleotide
  source 1..2196: mol_type = other RNA
tcagggggatccagcgggggctcctccggctctgagactcccgggactagcgagagcgctactcccgagagctcagggggaagctccggcggctccagcaccctgaacatcgaggacgagtacaggctgcacgagaccagcaaggagcccgacgtgagtctgggctccacctggctgtccgacttcccccaggcctgggccgagaccggcggcatgggcctggccgtgaggcaggcccccctgatcatccccctgaaggccaccagcaccccggtgtccatcaagcagtaccccatgtcccaggaggccaggctgggcatcaagccccacatccagcggctgctggaccaggggatcctggtgccctgccagagcccctggaacacccccctgctgcctgtgaagaagccaggcaccaacgactacaggcctgtgcaggatctgcgcgaggtgaacaagagggtggaggacatccaccccaccgtgccaaatccttacaacctgctgtccggcctgcctccttcacaccagtggtacaccgtgctggacctgaaggacgccttcttctgcctgagactgcaccccacctctcagcctctgttcgccttcgaatggagggaccctgagatggggatctcaggccagctgacctggacccggctgccccagggcttcaagaacagccccaccctgttcaatgaggccctgcaccgggacctggccgacttcagaatccagcacccagatctgatcctgctgcagtacgtggacgacctgctgctggccgccaccagcgagctggactgccagcagggcaccagagccctgctgcagaccctggggaatctgggctatcgggccagcgccaagaaggcccagatttgccagaagcaggtgaagtatctgggctacctgctgaaggagggccagaggtggctgaccgaggccaggaaggagacagtgatggggcagccaacccccaagacccccaggcagctgcgggagtttctggggaaggccggcttctgccggctgttcatccccggcttcgccgagatggctgccccactgtaccctctgaccaagcccggcaccctgttcaactggggccccgaccagcagaaggcctaccaggagatcaagcaggccctgctgaccgccccagccctgggcctgcctgatctgaccaagcccttcgagctgttcgtggacgagaagcaggggtacgccaagggcgtgctgacccagaagctgggcccctggcggcggccggtggcctacctgtccaagaagctggaccccgtggccgccggctggccaccctgtctgcggatggtggctgctatcgccgtgctgaccaaggacgccgggaagctgaccatgggtcagcccctggtgatcctggccccacacgccgtggaggccctggtgaagcagccaccagacaggtggctgagcaacgccaggatgacccactaccaggccctgcttctggacaccgacagggtgcagttcggccccgtggtggccctgaaccccgccactctgctgcccctgcccgaggagggcctgcagcacaactgcctggacatcctggcagaggcccacggcaccaggcccgacctgaccgaccagcctctgccagatgccgaccacacctggtacaccgacggcagttccctgctgcaggaggggcagcggaaggccggggccgccgtgaccaccgagaccgaggtgatctgggccaaggccctgcccgcagggacctccgcccagagggccgagctgatcgccctgacccaggccctgaagatggccgagggcaagaagctgaacgtgtacacagacagccgctacgccttcgccaccgcccacatccacggcgagatctacaggcgcaggggctggctgaccagcgagggcaaggagatcaagaacaaggatgagatccttgccctgctgaaggccctgttcctgcccaagcggctgtctatcatccactgccccggccatcagaagggccacagtgctgaggctcgggggaacaggatggccgaccaggccgccaggaaggccgccatcactgagacccccgacaccagcaccctgctgatcgagaacagcagccctagcggcggctccaagaggaccgccgacgggagcgagttcgagcccaagaagaagcggaaggtgtga

SEQ ID NO: 453 - RNA, 2196 nt, synthetic construct
  misc_feature 1..2196: note = Description of Artificial Sequence: Synthetic polynucleotide
  source 1..2196: mol_type = other RNA
tccggcggctccagcggcggcagctccgggtccgagacccctgggaccagcgagtctgccacccctgagagctccggcggctcctctgggggaagcagcaccctgaacatcgaggacgagtacaggctccacgagaccagcaaggagcctgacgtgtccctgggcagcacctggctgtccgacttcccccaggcctgggccgagaccgggggcatgggcctggccgtgcgccaggcccccctgatcatcccactgaaggccaccagcacccccgtgtccatcaagcagtaccccatgtcccaggaggccaggctgggcatcaagccccacatccagcgcctgctggatcaggggatcctggtgccctgccagagcccctggaacacccccctgctgccggtgaagaagcccggcaccaacgactacaggcccgtgcaggacctgagggaggtgaacaagagggtggaggacatccaccctactgtgcccaatccctacaacctgctgagcggcctgccccccagccatcagtggtacaccgtgctggacctgaaggatgccttcttctgcctgaggctgcatcccaccagccagcccctgttcgccttcgagtggagagacccagagatggggatctccgggcagctgacctggacccggctgccccagggcttcaagaacagccccaccctgttcaacgaggccctgcacagggacctggctgacttcaggatccagcaccccgacctgatcctgctgcagtacgtggatgacctgctgctggcagccaccagcgagctggactgccagcagggcacccgcgccctgctgcagaccctggggaatctgggctatcgggccagcgccaagaaggcccagatttgccagaagcaggtcaagtacctgggctacctgctgaaggaggggcagcggtggctgaccgaggcacggaaggagaccgtgatgggtcagcccacccccaagacccccaggcagctgcgggagtttctcggcaaggccgggttctgcaggctgttcatccccggctttgccgagatggctgcccctctgtaccccctgaccaagccagggaccctgttcaactggggcccagaccagcagaaggcctatcaggagatcaagcaggccctgctgaccgccccagccctgggcctgcctgacctgaccaagcccttcgagctgtttgtggacgagaagcagggctacgccaagggcgtgctgacccagaagctgggcccttggcggaggcctgtggcctacctgagcaagaagctggaccccgtggcagccggctggcctccttgcctgaggatggtggccgccatcgccgtcctcaccaaggacgccggcaagctgaccatgggccagcctctggtgatcctggccccacacgccgtggaggccctggtgaagcagccacctgacaggtggctgtccaacgccaggatgacccactaccaggccctgcttctcgacacagacagggtgcagttcggccccgtggtggccctgaaccccgccaccctgctgcccctccccgaggaggggctgcagcacaactgtctggacatcctggcagaggcccacggcaccaggcccgacctgaccgaccagcctctgccagatgccgaccacacctggtacacggacggctccagcctgctgcaggagggccagcggaaggctggagccgccgtgaccaccgagacagaggtgatctgggccaaggccctgcccgcagggacctccgcccagagggccgagctgatcgccctgacccaggccctgaagatggccgagggcaagaagctgaacgtgtacaccgacagccggtacgccttcgccaccgcccacatccacggcgagatctacaggcggcggggatggctgaccagcgagggcaaggagatcaagaacaaggacgagatcctggccctgctgaaggccctgttcctgcccaagcgcctgtccatcatccactgccccggccatcagaagggccactctgctgaggcccgggggaatcggatggccgaccaggccgcccggaaggccgccatcaccgagacccccgacaccagcaccctgctgatcgagaacagcagccccagcggcggctccaagcggaccgccgacggctctgagttcgagccaaagaagaagaggaaggtgtga

SEQ ID NO: 454 - RNA, 2196 nt, synthetic construct
  misc_feature 1..2196: note = Description of Artificial Sequence: Synthetic polynucleotide
  source 1..2196: mol_type = other RNA
tctggggggagctccggagggagctccgggtccgagacccccggcacctccgagagcgccaccccagagagcagcgggggcagcagcggcggcagctccaccctcaacatcgaggacgagtacaggctgcacgagacctccaaggagcccgacgtgagcctgggcagcacctggctgtccgacttcccccaggcctgggccgagaccggcggcatgggcctggccgtgcggcaggcccccctgatcatcccactgaaggccaccagcacccccgtgtccatcaagcagtaccccatgtcccaggaggctcggctgggcatcaagccccacatccagcggctgctggatcaggggatcctggtgccctgccagagcccctggaacaccccactgctgccagtgaagaagcctggcaccaacgactacaggccagtgcaggacctgagggaggtgaacaagagggtggaggacatccaccctactgtgcccaatccctacaacctgctgtctggcctgccccccagccatcagtggtacaccgtgctggacctgaaggacgccttcttctgtctgcggctgcaccccaccagccagcccctgttcgccttcgaatggagggacccagagatgggcatcagcggacagctgacctggacccggctgccccagggcttcaagaacagccccaccctgttcaatgaggccctgcaccgggacctggccgacttcaggatccagcacccagacctgatcctgctgcagtacgtggacgatctcctcctggccgccacctctgagctcgactgtcagcagggcacccgggccctgctgcagactctgggcaatctgggctaccgggccagcgccaagaaggcccagatctgccagaagcaggtgaagtacctgggctacctgctgaaggagggccagaggtggctgaccgaggccaggaaggagaccgtgatggggcagcccacccccaagaccccacggcagctgcgggagtttctggggaaggccggcttctgccggctgttcatccccggcttcgccgagatggccgcccccctgtaccccctgaccaagccagggaccctgttcaattggggtcccgaccagcagaaggcctatcaggagatcaagcaggccctgctgaccgccccagccctgggcctgcctgacctgaccaagcccttcgagctgttcgtggacgagaagcaggggtacgccaagggcgtgctgactcagaagctggggccctggcggaggcccgtggcctacctgtccaagaagctggaccccgtggcagccggctggcctccttgcctcaggatggtggccgccatcgccgtcctgaccaaggacgccggcaagctgaccatgggccagcctctggtgatcctggccccacacgccgtggaggccctggtgaagcagccacctgacaggtggctgtccaacgccaggatgacccactaccaggccctgctgctggacaccgacagggtgcagttcggccccgtggtggccctgaaccccgccactctgctgcccctgcccgaggagggcctgcagcacaactgcctggacatcctggcagaggcccacggcaccagacccgatctgaccgaccagcctctgccagatgccgaccacacctggtacaccgacggcagttccctgctgcaggaggggcagcggaaggccggggccgccgtgaccaccgagaccgaggtgatctgggccaaggccctgcccgcagggacctccgcccagagggccgagctgatcgccctgacccaggccctgaagatggccgagggcaagaagctgaacgtgtacactgactccaggtacgccttcgccaccgcccacatccacggcgagatctatcgccggcggggctggctgaccagcgagggcaaggagatcaagaacaaggatgagatcctggccctgctgaaggccctgttcctgcctaagaggctgagcatcatccactgccccggccatcagaagggccacagtgccgaggccaggggcaacaggatggccgaccaggccgcccggaaggccgccatcactgagacccctgacaccagcaccctgctgatcgagaactccagccccagcggcggctccaagaggaccgccgacggctccgagttcgagcccaagaagaagcggaaggtgtga

SEQ ID NO: 455 - RNA, 2196 nt, synthetic construct
  misc_feature 1..2196: note = Description of Artificial Sequence: Synthetic polynucleotide
  source 1..2196: mol_type = other RNA
agcgggggcagctccggcggctcctctggcagcgagactcccgggactagcgagagcgctacccccgagagctctgggggctccagcggcgggagctccaccctcaacatcgaggacgagtaccggctgcacgagacctccaaggagcccgacgtgagtctgggctccacctggctgtcagacttccctcaggcctgggccgagaccgggggcatgggcctggccgtgcgccaggccccgctgatcatccctctgaaggccaccagcacccccgtgtctatcaagcagtaccccatgtcccaggaggctcggctgggcatcaagccccacatccagcggctgctggatcaggggatcctggtgccctgccagagcccctggaacaccccactgctgcctgtgaagaagccaggcaccaacgactaccggcccgtgcaggacctgagggaggtgaacaagagggtggaggacatccaccctactgtgcccaacccctacaacctgctgagcggcctgccacccagccaccagtggtacaccgtgctggacctgaaggacgccttcttctgtctgcggctgcaccccacctcccagccactgttcgccttcgagtggcgggaccccgagatggggatcagcggccagctgacctggaccaggctccctcagggcttcaagaacagccccaccctgttcaatgaggccctgcacagggacctggccgacttcaggatccagcacccagacctgatcctgctgcagtacgtggacgacctgctgctggccgccaccagcgagctggactgccagcagggcaccagggccctgctgcagaccctgggcaatctgggctatcgggccagcgccaagaaggcccagatctgccagaagcaggtgaagtacctgggctacctgctgaaggagggacagaggtggctgaccgaggccaggaaggagaccgtgatgggccagcctaccccaaagacccctcggcagctgagggagtttctggggaaggctggcttctgccggctcttcattcctggcttcgccgagatggcagcccctctgtaccctctgaccaagcccgggaccctgttcaactggggcccagaccagcagaaggcctatcaggagatcaagcaggccctgctgaccgccccagccctgggcctgcctgacctgaccaagcccttcgagctgttcgtggacgagaagcagggctacgccaagggcgtgctgacccagaagctgggtccttggaggaggcccgtggcctacctgtccaagaagctggaccccgtggcagccggctggcctccttgcctcaggatggtggccgccatcgccgtcctgaccaaggacgccggcaagctgaccatgggccagcccctggtcatcctggccccacacgccgtggaggccctggtgaagcagccacccgacaggtggctgtccaacgccaggatgacccactaccaggccctgcttctggacaccgacagggtgcagttcggccccgtggtggccctgaaccccgccaccctgctgcctctgcccgaggagggcctgcagcacaactgcctggacatcctggcagaggcacacgggaccaggcccgacctgacagaccagcccctgccagacgctgaccacacctggtacaccgatggcagcagcctgctgcaggagggccagcggaaggccggggccgccgtgaccaccgagaccgaggtgatctgggccaaggccctgcccgcagggacctccgcccagagggccgagctgatcgccctgacccaggccctgaagatggccgagggcaagaagctgaatgtgtacaccgacagccgctacgccttcgccaccgcccacatccacggcgagatctacaggcggaggggctggctgaccagcgagggcaaggagatcaagaacaaggacgagatcctggccctgctgaaggccctgttcctccccaagcggctgtccatcattcattgccccggccatcagaagggccactctgctgaggccaggggcaatcggatggccgaccaggccgccagaaaggccgccatcaccgagacccctgacaccagcaccctgctgatcgagaacagctctcccagcgggggctccaagaggaccgccgacgggagcgagttcgagcccaagaagaagcggaaggtgtga

SEQ ID NO: 456 - RNA, 2196 nt, synthetic construct
  misc_feature 1..2196: note = Description of Artificial Sequence: Synthetic polynucleotide
  source 1..2196: mol_type = other RNA
agcggcggctccagcgggggctcctccggcagcgagacccccggcaccagcgagtcagccacccctgagagctccgggggctcctccggcggctccagcaccctgaacatcgaggacgagtacaggctgcacgagaccagcaaggagcccgacgtgagcctgggcagcacctggctgtccgacttcccccaggcctgggccgagaccggcggcatgggcctggccgtgaggcaggcccctctgatcatccccctgaaggccaccagcacccctgtgtccatcaagcagtaccccatgagccaggaggctcggctgggcatcaagccccacatccagcggctgctggatcaggggatcctggtgccctgccagagcccctggaacaccccactgctgccagtgaagaagcctggcaccaacgactacaggcccgtgcaggacctcagggaggtgaacaagcgggtggaggatatccaccccaccgtgcctaatccttacaacctgctgagcggcctgcctcccagccatcagtggtacaccgtgctggatctgaaggatgccttcttttgcctgagactgcatcccacctcccagccactgttcgccttcgagtggcgggacccagagatgggcatcagcggccagctgacctggaccaggctgcctcagggcttcaagaacagccccaccctgttcaatgaggccctgcacagggacctggccgactttcggatccagcaccctgacctgatcctgctgcagtacgtggatgacctgctgctggctgccaccagcgagctggactgccagcagggcaccagagccctgctgcagaccctggggaatctgggctatcgggccagcgccaagaaggcccagatttgccagaagcaggtcaagtacctgggctatctgctgaaggagggacagaggtggctgaccgaggccaggaaggagacagtgatgggccagcctaccccaaagactccccggcagctgagggagtttctggggaaggctggcttctgcaggctgtttattcctggcttcgccgagatggcagcccctctgtaccctctgaccaagcccggcaccctgttcaactgggggccggatcagcagaaggcctaccaggagatcaagcaggccctgctgaccgccccagccctgggcctgcctgatctgaccaagcccttcgagcttttcgtggacgagaagcagggctacgccaagggcgtgctgacccagaagctgggcccttggcggcggccagtggcctacctgtccaagaagctggacccagtggccgccggctggcccccctgtctgaggatggtggctgccatcgccgtcctgaccaaggacgccggcaagctcaccatgggccagcccctggtgatcctggccccccacgccgtggaggctctggtgaagcagccacccgacaggtggctgtccaacgccaggatgacccactaccaggccctgctgctggacaccgacagggtgcagttcgggccagtggtggccctgaaccctgccaccctgctgcccctccccgaggaggggctgcagcacaactgcctggacatcctggccgaggcccacggcaccaggccagacctgacagaccagcccctgcccgacgccgaccacacctggtacaccgacggcagcagcctgctgcaggagggccagaggaaggccggcgccgccgtgaccaccgagaccgaggtgatctgggccaaggccctgcccgctgggaccagcgcccagcgggcagagctgattgccctcacccaggccctgaagatggccgagggcaagaagctgaacgtgtacactgacagcaggtacgcgttcgccaccgcccacatccacggcgagatctaccggcgcaggggctggctgaccagcgagggcaaggagatcaagaacaaggacgagatccttgccctgctgaaggctctgttcctgcctaagaggctgagcatcatccactgccccggccaccagaaggggcacagcgccgaggccaggggcaacaggatggccgaccaggcggccagaaaggccgccatcaccgagacccccgataccagcaccctgctgatcgagaacagctctccctctggcgggagcaagagaaccgctgacggcagcgagttcgagcctaagaagaagcggaaggtgtga

SEQ ID NO: 457 - RNA, 2196 nt, synthetic construct
  misc_feature 1..2196: note = Description of Artificial Sequence: Synthetic polynucleotide
  source 1..2196: mol_type = other RNA
agcgggggctcctccggaggcagctccggcagcgagacccccggcaccagcgagagcgctactcccgagtccagcggcgggagtagcggaggctccagcaccctgaacatcgaggacgagtacaggctgcacgagacctccaaggagcccgacgtgagtctgggctccacctggctgagcgacttcccccaggcctgggccgagaccggcggcatgggcctggccgtgcggcaggcccctctgatcatccccctcaaggccaccagcacccctgtgtccatcaagcagtaccccatgtcccaggaggctcggctgggcatcaagccccacatccagcggctgctggatcaggggatcctggtgccctgccagagcccctggaacaccccactgctgcccgtgaagaagccgggcaccaacgactacaggcccgtgcaggacctgagggaggtgaacaagagggtggaggacatccaccctaccgtgcccaacccctacaacctgctgagcggcctgcccccaagccaccagtggtacaccgtgctggatctgaaggatgccttcttctgcctgaggctgcatcccacctcccagccactgttcgccttcgagtggcgggacccagagatgggcatctctgggcagctgacctggaccaggctccctcagggcttcaagaacagccccaccctgttcaatgaggccctgcacagggacctggccgactttcggatccagcaccccgacctgatcctgctgcagtacgtggacgacctgctgctggccgccaccagcgagctggactgccagcagggcaccagagccctgctgcagaccctggggaatctgggctaccgggccagcgccaagaaggcccagatttgccagaagcaggtgaagtacctgggctacctgctgaaggagggacagaggtggctgaccgaggccaggaaggagaccgtcatgggccagcctacccccaagacccccaggcagctgcgggagtttctggggaaggctggcttctgtcggctcttcattcctggcttcgccgagatggccgcccctctgtaccctctgaccaagcccgggaccctgttcaactggggtcccgaccagcagaaggcctatcaggagatcaagcaggccctgctgaccgccccagccctgggcctgcctgacctgaccaagcccttcgagctgttcgtggacgagaagcagggctacgccaagggcgtgctgacccagaagctgggcccttggcggcgccctgtggcctacctgtccaagaagctggaccccgtggccgcagggtggcctccatgcctgcggatggtggccgcgatcgccgtgctgaccaaggacgctggcaagctgaccatgggtcagccactggtgatcctggccccacacgccgtggaggccctggtgaagcagccacctgacaggtggctgtccaacgccaggatgacccactaccaggccctgcttctcgacaccgacagggtgcagttcggccccgtggtggccctgaaccccgccactctgctgcccctccccgaggaggggctgcagcacaactgtctggacattctggccgaggcccacggcactcggccagacctgacagaccagcccctccccgacgccgaccacacctggtacaccgacggcagcagcctgctgcaggaggggcagcggaaggccggggccgccgtgaccaccgagaccgaggtgatctgggccaaggccctgcccgccgggacctccgcccagagggccgagctgatcgccctgacccaggccctgaagatggccgagggcaagaagctgaacgtgtacactgacagcaggtacgccttcgctaccgcccacatccacggcgagatctacaggcgcaggggctggctgaccagcgagggcaaggagatcaagaacaaggacgagatcctggccctgctgaaggccctgttcctgcccaagcgcctgtccatcatccactgccccggccatcagaagggccactccgctgaggcccgcggcaaccggatggccgaccaggccgcccggaaggccgccatcacagagacccccgacaccagcaccctgctgatcgagaactctagccccagcggcggctccaagcggaccgccgacggctcagagttcgagcccaagaagaagcggaaggtgtga

SEQ ID NO: 458 - RNA, 2196 nt, synthetic construct
  misc_feature 1..2196: note = Description of Artificial Sequence: Synthetic polynucleotide
  source 1..2196: mol_type = other RNA
agcggcgggagctctgggggctcctctggctccgagacccccggaacctccgagagcgccactccggagagctccgggggctccagcggcggcagctctaccttgaacatcgaggacgagtaccgcctgcacgagaccagcaaggagcccgacgtgtccctgggctccacctggctgagcgactttcctcaggcctgggccgagaccgggggcatgggcctggccgtgcgccaggcccctctgatcatccccctgaaggccaccagcactcccgtgagcatcaagcagtaccctatgagccaggaggccaggctgggcatcaagccccacatccagaggctgctggaccagggcatcctggtgccctgccagagcccctggaacaccccactgctgccagtgaagaagcctggcaccaacgactacaggcccgtgcaggacctgagggaggtgaacaagagggtggaggacatccaccctaccgtgcctaacccttacaacctgctgtcgggcctgcctcctagccatcagtggtacaccgtgctggacctgaaggacgccttcttctgcctgcggctgcaccccaccagccagcctctgttcgccttcgaatggagggatcccgagatggggatcagcgggcagctgacctggacccggctgccccagggcttcaagaacagccctaccctgttcaatgaggccctgcaccgggacctggcggacttcaggatccagcacccagatctgatcctgctgcagtacgtggacgacctgctgctggccgccaccagcgagctggactgccagcagggcaccagagccctgctgcagaccctggggaatctgggctacagggccagcgccaagaaggcccagatttgccagaagcaggtgaagtatctgggctacctgctgaaggagggacagaggtggctgaccgaggccaggaaggagaccgtgatgggccagcctaccccaaagacccccaggcagctgcgggagtttctggggaaggctggcttctgccggctcttcattcctggcttcgccgagatggccgcccctctgtaccctctgaccaagcccgggaccctgttcaactggggtcccgaccagcagaaggcttatcaggagatcaagcaggccctgctgaccgccccagccctgggcctgcctgacctgactaagcctttcgagctgttcgtggacgagaagcagggctacgccaagggcgtgctgacccagaagctgggcccttggcggcggcccgtggcctacctgtccaagaagctggaccccgtggccgccggctggccaccatgcctgcgcatggtggccgccatcgccgtgctgaccaaggacgccgggaagctgaccatgggccagcccctggtgatcctggcccctcacgccgtggaggccctggtgaagcagccaccagacaggtggctgtccaacgccaggatgacccactaccaggccctgcttctggacacggacagggtgcagttcggccctgtggtggccctgaaccctgccaccctgctgcctctgcccgaggaggggctgcagcacaactgtctggacattctggccgaggcccacggcactcggccagacctgacagaccagcccctccccgacgccgaccacacctggtacacagacggcagcagcctgctgcaggagggccagcgcaaggccggcgccgccgtgaccaccgagaccgaggtgatctgggccaaggccctgcccgccggcactagcgcccagagggccgagctgatcgccctgactcaggccctgaagatggccgagggcaagaagctgaacgtgtacaccgacagccgctatgccttcgccaccgcccacatccacggcgagatctacaggaggcggggatggctgaccagcgagggcaaggagatcaagaacaaggatgagatcctggccctgctgaaggccctgttcctgcctaagcgcctgagcatcatccattgccccgggcaccagaagggccactccgctgaggcccggggcaataggatggccgatcaggccgccagaaaggccgccatcacagagacccccgacaccagcaccctgctgatcgagaactcctcccccagcggcggttctaagagaaccgccgacgggagcgagttcgagcccaagaagaagaggaaggtgtga

SEQ ID NO: 459 - RNA, 2196 nt, synthetic construct
  misc_feature 1..2196: note = Description of Artificial Sequence: Synthetic polynucleotide
  source 1..2196: mol_type = other RNA
agcgggggcagctccggaggttccagcgggtccgagacccctggaacctccgagagcgccacccccgagagcagcgggggcagcagcggcgggagctccaccctgaacatcgaggacgagtaccggctgcacgagaccagcaaggagcccgacgtgagtctgggctccacctggctctccgacttcccacaggcctgggccgagaccggggggatgggcctggccgtgcgccaggcccccctgatcatccccctgaaggccacctccacccccgtgtctatcaagcagtaccccatgtcccaggaggctcggctgggcatcaagccccacatccagcggctgctggatcaggggatcctggtgccctgccagagcccctggaacacccccctgctgcccgtgaagaagcccgggaccaacgactacaggcctgtgcaggacctgagggaggtgaacaagagggtggaggacatccaccctaccgttcccaatccctacaacctgctgtccgggctgccccccagccaccagtggtacaccgtgctggacctgaaggatgcctttttctgcctgcggctgcaccccaccagccagccactcttcgccttcgagtggcgggacccagagatgggcatcagcggccagctgacctggacccggctgccccagggcttcaagaacagccccaccctgttcaatgaggccctgcaccgggacctggccgacttcaggatccagcaccctgacctgatcctgctgcagtacgtggacgacctgctgctggccgccaccagcgagctggactgccagcagggcaccagagccctgctgcagaccctgggcaatctggggtacagggcctccgccaagaaggcccagatctgccagaagcaggtgaagtacctgggctatctgctgaaggaggggcagcggtggctcaccgaggccaggaaggagaccgtgatggggcagcccacccccaagacccccaggcagctgcgggagttcctggggaaggccggcttctgccggctgttcattcctggcttcgctgagatggctgcccccctgtaccccctgaccaagcccgggaccctgttcaactggggccccgaccagcagaaggcctaccaggagatcaagcaggccctgctgaccgccccagccctgggcctgcctgatctgaccaagcccttcgagctgttcgtggacgagaagcaggggtacgccaagggcgtgctgacccagaagctgggcccctggaggaggccggtggcctacctgtccaagaagctggaccccgtggccgccggctggccaccatgcctgaggatggtggccgccatcgccgtgctgaccaaggacgccgggaagctgaccatgggtcagcccctggtgatcctggcccctcacgccgtggaggccctggtgaagcagccacctgacaggtggctgtccaacgccaggatgactcactaccaggccctgctgctggacaccgacagggtgcagttcggccccgtggtggccctgaaccccgccactctgctgcccctgcccgaggagggcctgcagcacaactgcctggacatcctggcagaggcccacggcaccaggcccgacctgaccgaccagcctctgccagatgccgaccacacctggtacaccgacggcagcagcctgctgcaggaggggcagcggaaggccggggccgccgtgaccaccgagaccgaggtgatctgggccaaggccctgcccgccgggacctccgcccagagggccgagctgatcgccctgacccaggccctgaagatggccgagggcaagaagctgaatgtgtacaccgacagccggtacgctttcgccaccgcccacatccacggcgagatctaccggcggaggggctggctgaccagcgagggcaaggagatcaagaacaaggatgagatcctggccctgctgaaggccctgttcctccccaagcggctgagcatcattcactgccccggccatcagaagggccacagtgccgaggcccgggggaacaggatggccgaccaggccgcccggaaggccgccatcactgagacccccgacaccagcaccctgctgatcgagaactcctctcccagcggcggtagcaagcgcaccgccgatgggagcgagttcgagcccaagaagaagcggaaggtgtga

SEQ ID NO: 460 - RNA, 2196 nt, synthetic construct
  misc_feature 1..2196: note = Description of Artificial Sequence: Synthetic polynucleotide
  source 1..2196: mol_type = other RNA
agcgggggcagctccggaggctccagcgggtccgagacccctggaacctccgagagcgccacccccgagagcagcgggggctcctctgggggctccagcactctgaacatcgaggacgagtacagactgcacgagacctccaaggagcccgacgtgtctctgggcagcacctggctgtccgacttccctcaggcctgggctgagaccggtggcatgggcctggctgtgcggcaggcccccctgatcatccccctgaaggccacaagcacccctgtgtccatcaagcagtaccccatgtcccaggaggctcggctgggcatcaagccccacatccagcggctgctggatcaggggatcctggtgccctgccagagcccctggaacaccccactgctgcctgtgaagaagccaggcaccaatgactaccggccagtccaggacctgagggaggtcaacaagagggtggaggacatccaccctaccgtgcccaacccctacaacctgctgagtggcctgccccccagccaccagtggtacaccgtgctggacctgaaggatgcctttttctgtctgcggctgcaccccacctctcagcctctgttcgccttcgaatggagggaccctgagatggggatcagcgggcagctgacctggactcggctgccccagggcttcaagaacagccccaccctgttcaatgaggccctgcacagagacctggcagacttcaggatccagcacccagacctgatcctgctgcagtacgtggacgacctgctgctggccgccaccagcgagctggactgccagcagggcaccagagccctgctgcagaccctgggaaatctgggctaccgggccagcgccaagaaggcccagatttgccagaagcaggtgaagtacctgggctacctgctgaaggaggggcagcgctggctcaccgaggctcggaaggagaccgtgatgggccagcctacccctaagacccccaggcagctgcgggagttcctggggaaggccggcttctgccggctgttcatccccggcttcgctgagatggccgcccctctgtaccccctgaccaagcccggcaccctgttcaattggggccccgaccagcagaaggcttatcaggagatcaagcaggccctgctgaccgccccagccctgggcctgcctgacctgactaagcctttcgagctgttcgtggacgagaagcagggctacgccaagggggtgctgacccagaagctgggcccatggcggcggccagtggcctacctgtccaagaagctggacccagtggccgccgggtggccaccatgcctgcgcatggtggccgccatcgccgtgctgaccaaggacgccgggaagctgaccatgggtcagcccctggtgatcctggccccacacgccgtggaggccctggtgaagcagccacccgacaggtggctgtccaacgccaggatgacccactatcaggccctgcttctggacaccgacagggtgcagttcggccctgtggtggccctgaacccggccaccctgctgcccctgcccgaggagggcctgcagcacaactgcctggacatcctggcagaggcccacggcaccaggcccgacctgaccgaccagcctctgccagatgccgaccacacctggtacaccgacggcagttccctgctgcaggaggggcagcggaaggccggcgccgccgtgaccaccgagaccgaggtgatctgggccaaggccctgcctgccgggaccagcgcccagagggccgagctgatcgccctgacccaggccctgaagatggccgagggcaagaagctgaatgtgtacaccgacagcagatacgccttcgccacagcccacatccacggcgagatctaccggcgccgcggatggctgaccagcgagggcaaggagatcaagaacaaggatgagatcctggccctgctgaaggccctgtttctgcccaagcggctgagcatcattcattgccccggccatcagaagggccacagcgccgaggccaggggcaacaggatggccgaccaggccgccagaaaggccgccatcactgagacccctgacaccagcaccctgctgatcgagaactcctctcccagcggcggctccaagaggaccgccgatgggagcgagttcgagcccaagaagaagcggaaggtgtga

SEQ ID NO: 461 - RNA, 2196 nt, synthetic construct
  misc_feature 1..2196: note = Description of Artificial Sequence: Synthetic polynucleotide
  source 1..2196: mol_type = other RNA
agcgggggcagctccggaggctccagcgggtccgagacccctggaacctccgagagcgccacccccgagagctccgggggctcctctggcggcagcagtactctgaacatcgaggacgagtaccggctgcacgagaccagcaaggagcccgacgtgagcctgggcagcacctggctgtccgacttccctcaggcctgggccgagaccggggggatgggcctggccgtgcgccaggcccctctgatcatccccctgaaggccaccagcacccccgtgtccatcaagcagtaccccatgtcccaggaggctcggctgggaatcaagccccacatccagcggctgctggatcaggggatcctggttccctgccagagcccctggaacaccccactgctgccagtgaagaagcctggcaccaacgactacaggcctgtccaggacctgagggaggtgaacaagagggtggaggacatccaccctaccgtgccaaacccctacaacctgctgagcgggctgccgccctctcaccagtggtacaccgtgctggacctgaaggatgcctttttctgcctgaggctgcaccccaccagccagcctctgttcgccttcgagtggcgggacccagagatgggcatcagcggccagctgacctggaccaggctccctcagggcttcaagaacagtcccacactgttcaatgaggccctgcacagggacctggccgacttcaggatccagcaccccgatctgatcctcctgcagtacgtggacgacctgctgctggccgccaccagcgagctggactgccagcagggcaccagggccctgctgcagaccctgggaaatctgggctatcgggccagcgccaagaaggcccagatttgccagaagcaggtgaagtacctgggctacctgctgaaggagggtcagaggtggctgaccgaggcccgcaaggagaccgtgatgggccagcccacccccaagaccccacggcagctgcgcgagttcctgggaaaggccggcttctgccggctgttcatcccaggattcgccgagatggccgcccccctgtaccccctgaccaagcctggcaccctgttcaactgggggccagatcagcagaaggcttatcaggagatcaagcaggccctgctgaccgccccagccctgggcctgcctgacctgactaagccttttgagctgttcgtggacgagaagcagggctacgccaagggcgtgctgacccagaagctgggcccttggcggcggcctgtggcctacctgtccaagaagctggaccccgtggccgcaggctggccaccatgcctgcgcatggtggccgccatcgccgtgctgaccaaggacgccgggaagctgaccatgggtcagcccctggtgatcctggcccctcacgccgtggaggccctggtgaagcagccacccgacaggtggctgtccaacgccaggatgacccactaccaggccctgctgctcgacaccgacagggtgcagttcggccccgtggtggccctgaaccccgccactctgctgcccctgcctgaggaggggctgcagcacaactgtctggacattctggccgaggcccacggcactcggccagacctgacagaccagcctctgcccgacgctgaccacacctggtacaccgacggcagctccctcctgcaggaggggcagcggaaggccggggccgccgtgaccaccgagaccgaggtgatctgggccaaggccctgcccgccgggacctcggcccagagggccgagctgatcgccctgacccaggccctgaagatggccgagggcaagaagctgaacgtgtacaccgactctcggtacgccttcgctactgcccacatccacggggagatctatcggcggcggggctggctgaccagcgagggcaaggagatcaagaacaaggacgagatcctggccctgctgaaggccctgttcctgcccaagcggctgtccatcatccattgccccgggcaccagaagggccactctgctgaggcccggggcaataggatggccgaccaggccgccaggaaggccgccatcaccgagacccccgacaccagcaccctgctgatcgagaacagctcccccagcggcgggagcaagcgcaccgccgacgggagcgagttcgagcccaagaagaagcggaaggtgtga

SEQ ID NO: 462 - RNA, 2196 nt, synthetic construct
  misc_feature 1..2196: note = Description of Artificial Sequence: Synthetic polynucleotide
  source 1..2196: mol_type = other RNA
tccgggggcagctccggaggttccagcgggtccgagacccctggaacctccgagagcgccacccccgagagcagcgggggctcctctggaggctccagcaccctgaacatcgaggacgagtacaggctgcacgagacctccaaggagcccgatgtgtcactggggagcacctggctgtcagacttccctcaggcctgggccgagaccggcggcatgggcctggccgtgcgccaggcccccctgatcatccctctgaaggccaccagcaccccagtgagcatcaagcagtaccccatgtcccaggaggctcggctgggcatcaagccccacatccagcggctgctggatcaggggatcctggtgccctgccagagcccctggaacaccccactgctgcccgtgaagaagcccgggaccaacgactaccgccctgtgcaggacctgagggaggtgaacaagagggtggaggacatccaccccaccgtgcccaacccctacaacctgctgagcggcttgcccccaagccaccagtggtacaccgtgctggacctgaaggacgccttcttctgtctgaggctgcaccccaccagccagcctctgttcgccttcgagtggagagacccagagatgggcatctccgggcagctgacctggactcggctgccccagggcttcaagaacagccccaccctgttcaatgaggccctgcacagggacctggccgacttccggattcagcacccagatctgatcctgctgcagtacgtggacgacctgctgctggccgccaccagcgagctggactgccagcagggcaccagggccctgctgcagaccctggggaatctgggctatcgggccagcgccaagaaggcccagatttgccagaagcaggtgaagtatctgggctacctgctgaaggagggccagcgctggctgacagaggccaggaaggagaccgtcatgggccagcctaccccaaagactccccggcagctgcgggagtttctggggaaggccggcttctgccggctgttcatccccggcttcgccgagatggccgcccccctgtaccctctgaccaagccagggaccctgttcaactggggccccgaccagcagaaggcctaccaggagatcaagcaggccctgctgaccgccccagccctgggcctgcctgatctcaccaagcccttcgagctgttcgtggacgagaagcaggggtacgccaagggcgtgctgacccagaagctgggcccctggaggcggcccgtggcctacctgtccaagaagctggaccccgtggccgccggctggcccccttgcctgcggatggtggccgccatcgccgtcctgaccaaggacgcaggcaagctgaccatgggccagcctctggtcatcctggccccacacgccgtggaggccctggtgaagcagccacccgaccggtggctgtccaacgccaggatgacccactaccaggccctgcttctggacaccgacagggtgcagttcggccccgtggtggccctgaaccccgccactctgctgcccctgcccgaggagggcctgcagcacaactgcctggacatcctggcagaggcccacggcaccaggcctgatctgaccgaccagcccctgcccgacgcagatcacacctggtacaccgatgggtctagcctgctgcaggaggggcagcggaaggccggggccgccgtgaccaccgagaccgaggtgatctgggccaaggccctgcctgccggcacctccgcccagagggccgagctgatcgccctgacccaggccctgaagatggccgagggcaagaagctgaatgtgtacaccgacagccggtacgcattcgccaccgcccacatccatggagagatctataggaggcggggctggctgaccagcgagggcaaggagatcaagaacaaggacgagatcctggccctgctgaaggccctgttcctgcctaagaggctgagcatcatccactgccccggccatcagaagggccacagtgccgaggcccgggggaatcggatggccgaccaggccgccagaaaggccgccatcaccgagacccccgacaccagcaccctgctgatcgagaacagctccccctccggggggagcaagcggaccgccgacgggtccgagttcgagcccaagaagaagcggaaggtgtga

SEQ ID NO: 463 - RNA, 2196 nt, synthetic construct
  misc_feature 1..2196: note = Description of Artificial Sequence: Synthetic polynucleotide
  source 1..2196: mol_type = other RNA
agcggcggcagcagcggcggctccagcggcagcgagaccccagggaccagcgagagcgccacccccgagagctctggcggctcctctggaggctccagcaccctgaacatcgaggacgagtacaggctgcacgagacctccaaggagcccgatgtgtccctggggtccacctggctgtccgacttcccacaggcctgggccgagaccggagggatgggcctggccgtgcgccaggcccccctgatcatccctctgaaggccaccagcacccccgtgtccatcaagcagtaccccatgtcccaggaggctcggctgggcatcaagccccacatccagcggctgctggatcaggggatcctggtgccctgccagagcccctggaacaccccactgctgcctgtgaagaagccaggcaccaacgactaccggcccgtgcaggacctgagggaggtgaacaagagggtggaggacatccaccctactgtgcctaacccttacaacctgctgagcgggctgccccccagccaccagtggtacactgtgctggacctgaaggacgccttcttctgcctgaggctgcaccccaccagccagcccctgttcgcattcgagtggcgggatccagagatgggcatcagcggccagctgacctggactcggctgccccagggcttcaagaacagccccaccctgttcaatgaggccctgcacagggacctggccgacttcaggatccagcacccagatctgatcctgctgcagtatgtggacgacctgctgctggctgccaccagcgagctggactgccagcagggcaccagagccctgctgcagaccctggggaatctgggctatcgggccagcgccaagaaggcccagatttgccagaagcaggtcaagtacctgggctatctgctgaaggagggacagaggtggctgaccgaggccaggaaggagacagtgatgggccagcctaccccaaagacccccaggcagctgagggagtttctggggaaggctggcttctgtcggctgtttattcctggcttcgccgagatggcagcccctctgtaccctctgaccaagcctgggaccctgttcaactggggcccagatcagcagaaggcctaccaggagatcaagcaggccctgctgaccgccccagccctgggcctgcctgatctgaccaagcccttcgagctgtttgtggacgagaagcagggctacgccaagggcgtgctgacccagaagctgggcccttggcggcggccagtggcctacctgtccaagaagctggacccagtggccgccggctggcccccctgcctgaggatggtggctgccatcgccgtcctgaccaaggacgccggcaagctcaccatgggccagcccctggtcatcctggccccacacgccgtggaggccctggtgaagcagccacccgaccggtggctgtccaacgccaggatgacccactaccaggccctgctgctggacacagacagggtgcagttcggccccgtggtggccctgaaccccgccaccctgctgcccctccccgaggagggcctgcagcacaactgtctggacatcctggcagaggcccacggcaccaggccagacctgaccgatcagcctctgcccgatgccgaccacacctggtacacggacggctccagcctgctgcaggagggccagcggaaggccggagccgccgtgaccaccgagaccgaggtgatctgggccaaggccctgcccgcagggacctccgcccagagggccgagctgatcgccctgacccaggccctgaagatggccgagggcaagaagctgaacgtgtacactgactccaggtacgccttcgccaccgcccacatccatggagagatctataggaggcggggctggctgaccagcgagggcaaggagatcaagaacaaggatgagatccttgccctgctgaaggccctgttcctgcctaagaggctgagcatcatccactgccccggccatcagaagggccactcagccgaggccagggggaacaggatggccgaccaggccgcaaggaaggccgccatcaccgagacccccgataccagcaccctgctgatcgagaactcctcccccagcggcggctccaagaggaccgccgacgggagcgagttcgagcccaagaagaagcggaaggtgtga

SEQ ID NO: 464 - RNA, 2196 nt, synthetic construct
  misc_feature 1..2196: note = Description of Artificial Sequence: Synthetic polynucleotide
  source 1..2196: mol_type = other RNA
agcggggggagctccggcggctcctccgggagcgagactcccggcaccagcgagtccgccacccccgagagcagcggcggcagctccggggggagctccaccctgaacatcgaggacgagtacaggctgcacgagacctccaaggagcccgacgtgagcctgggcagcacctggctgtccgactttcctcaggcctgggccgagaccggcgggatgggcctggccgtgaggcaggcccctctgatcatccccctcaaggccaccagcacccctgtgtccatcaagcagtaccccatgtcccaggaggctcggctgggcatcaagccccacatccagcggctgctggatcaggggatcctggtgccctgccagagcccctggaacaccccactgctgccagtgaagaagcctggcaccaacgactacaggcccgtgcaggacctgagggaggtgaacaagagggtggaggacatccaccctaccgtgcccaacccctacaacctgctgagcggcctgcctcccagccaccagtggtacaccgtgctggacctgaaggacgccttcttctgcctgaggctgcaccccacctctcagcctctcttcgccttcgagtggagagaccctgagatggggatcagcgggcagctgacctggacccggctgccccagggcttcaagaacagccctacgctgttcaatgaggccctgcaccgggacctggccgacttcaggatccagcaccccgacctgatcctgctgcagtacgtggacgacctgctgctggccgccactagtgagctggactgccagcagggcaccagagccctgctgcagaccctgggcaatctggggtacagggccagcgccaagaaggcccagatctgccagaagcaggtgaagtacctgggctacctgctgaaggagggccagcggtggctgaccgaggcccggaaggagaccgtcatgggccagcctaccccaaagacccctcggcagctgagggagtttctggggaaggctggcttctgtcggctgttcatccccggcttcgccgagatggccgcccccctgtaccccctgaccaagcccgggaccctgttcaattggggtcccgaccagcagaaggcctaccaggagatcaagcaggccctgctgaccgccccagccctgggcctgcctgatctcaccaagcccttcgagctgttcgtggacgagaagcagggctacgccaagggcgtgctgacccagaagctgggcccttggcggcggccggtggcctacctgtccaagaagctggaccccgtggccgccggctggccaccatgcctgcgcatggtggccgccatcgccgtgctgaccaaggacgccgggaagctgaccatgggtcagcccctggtgatcctggcccctcacgccgtggaggccctggtgaagcagccacccgacaggtggctgtccaacgccaggatgacccactaccaggccctgctgctggacaccgacagggtgcagttcggcccggtggtggccctgaaccccgccaccctgctgcccctccccgaggaggggctgcagcacaactgcctggacatcctggcagaggcccacggcaccaggcccgacctgaccgaccagcctctgccagatgccgaccacacctggtacaccgacggcagcagcctgctgcaggagggccagcggaaggcaggcgccgccgtgaccaccgagaccgaggtgatctgggccaaggccctgcccgctggcacctccgcccagcgggccgagctgatcgccctgacccaggccctgaagatggccgagggcaagaagctgaacgtgtacactgacagcaggtacgccttcgccaccgcccacatccacggcgagatctacaggcgcaggggctggctgaccagcgagggcaaggagatcaagaacaaggatgagatccttgccctgctgaaggccctgttcctgcccaagcgcctgtccatcatccactgccccggccatcagaagggccactctgctgaggccaggggcaatcggatggccgaccaggccgccaggaaggccgccatcaccgagacccctgacaccagcaccctgctgatcgagaactcctcccccagcggcggctccaagaggaccgccgacgggagcgagttcgagccaaagaagaagaggaaggtgtga

SEQ ID NO: 465 - RNA, 2196 nt, synthetic construct
  misc_feature 1..2196: note = Description of Artificial Sequence: Synthetic polynucleotide
  source 1..2196: mol_type = other RNA
tcaggggggagcagcggggggtccagcggcagcgagacccccggcaccagcgagagcgccacccctgagagctccgggggctccagcgggggcagctccaccctgaacatcgaggacgagtacaggctgcacgagacctccaaggagcccgacgtgagcctgggctccacctggctgagcgacttccctcaggcctgggccgagaccggcggcatggggctggccgtgaggcaggcccccctgatcatccctctgaaggccaccagcacccccgtgtccatcaagcagtaccccatgtcccaggaggctcggctgggcatcaagccccacatccagcggctgctggatcaggggatcctggtgccctgccagagcccctggaacacccccctgctgcccgtgaagaagcctggtaccaacgactacaggcccgtgcaggacctgagggaggtgaacaagagggtggaggacatccaccctactgtgcctaacccttacaacctgctgagcggcctgcctccctcccaccagtggtacacagtgctggacctgaaggatgccttcttctgcctgaggctgcatcctaccagccagccactgtttgcctttgagtggagggaccccgagatggggatcagcggccagctgacctggaccaggctgccccagggcttcaagaacagccccaccctgttcaatgaggccctgcaccgggacctggccgacttcagaatccagcaccccgatctgatcctgctgcagtacgtggacgacctgctgctggccgccaccagcgagctggactgccagcagggcaccagagccctgctgcagaccctggggaatctgggctacagggccagcgccaagaaggcccagatttgccagaagcaggtgaagtatctggggtacctgctgaaggagggtcagcggtggctgaccgaggccaggaaggagacagtgatgggccagcctaccccaaagactccccggcagctgcgggagttcctggggaaggctggcttctgcaggctgttcatccccggcttcgccgagatggcagccccactgtaccccctgaccaagccagggaccctgttcaactggggccccgaccagcagaaggcctatcaggagatcaagcaggccctgctgaccgccccagccctgggcctgcctgacctgaccaagcccttcgagctgttcgtggacgagaagcagggctacgccaagggcgtgctgacccagaagctgggcccttggcggcggccagtggcctacctgtccaagaagctggaccccgtggccgctggctggcctccatgcctgcggatggtggccgccatcgccgtgctgaccaaggacgctggcaagctgaccatgggccagccactggtgatcctggccccacacgccgtggaggccctggtgaagcagccacccgacaggtggctgtccaacgccaggatgacccactaccaggccctgcttctggacaccgacagggtgcagttcggccccgtggtggccctgaaccccgccaccctgctgcccctgcccgaggagggcctgcagcacaactgcctggacatcctggccgaggcccacggcaccaggcccgacctgaccgaccagcctctgccagatgccgaccacacctggtacaccgacggcagcagcctgctgcaggaggggcagcggaaggccggggccgccgtgaccaccgagaccgaggtgatctgggccaaggccctgcccgccggcacctccgcccagagggccgagctgatcgccctgacccaggccctgaagatggccgagggcaagaagctgaatgtgtacacggacagccggtacgcattcgccaccgcccacatccacggggagatctaccggcggagggggtggctgaccagcgagggcaaggagatcaagaacaaggacgagatcctggccctgctgaaggccctgttcctgcctaagaggctgagcatcatccactgccccggccatcagaagggccacagcgcagaggccagggggaacaggatggccgaccaggccgcaaggaaggccgccatcaccgagacccccgacaccagcaccctgctgatcgagaactcctctcccagcggcggctccaagcggaccgccgatgggagcgagttcgagcccaagaagaagcggaaggtgtga

SEQ ID NO: 466 - RNA, 2196 nt, synthetic construct
  misc_feature 1..2196: note = Description of Artificial Sequence: Synthetic polynucleotide
  source 1..2196: mol_type = other RNA
agcggggggtctagcggcggcagcagcggcagcgagacccccggcacctccgagagcgccaccccagagagctctggggggagctccggaggctccagcaccctgaacatcgaggacgagtacaggctgcacgagaccagcaaggagcccgacgtgagtctgggctccacctggctgtccgacttccctcaggcctgggccgagaccggcggcatgggcctggccgtgcggcaggcccctctgatcatccctctgaaggccaccagcacccccgtgagcatcaagcagtaccccatgtcccaggaggctcggctgggcatcaagccccacatccagcggctgctggatcaggggatcctggtgccctgccagagcccctggaacacccccctgctgcccgtgaagaagcccgggaccaacgactacaggcccgtgcaggacctgagggaggtgaacaagagggtggaggacatccaccctaccgtgccaaacccctacaacctgctgagcgggctgccgccctctcaccagtggtacaccgtgctggacctgaaggacgcctttttctgtctgaggctgcaccccaccagccagcctctgttcgccttcgaatggagagacccagagatggggatctccgggcagctgacctggacccggctgccccagggcttcaagaacagccccaccctgttcaatgaggccctgcacagagacctggccgacttcaggatccagcacccagatctgatcctgctgcagtacgtggacgacctgctgctggccgccaccagcgagctggactgccagcagggcaccagggccctgctgcagaccctggggaatctgggctatcgggccagcgccaagaaggcccagatttgccagaagcaggtgaagtatctgggctacctgctgaaggagggacagaggtggctgaccgaggccaggaaggagaccgtgatgggccagcctaccccaaagacccccaggcagctgagggagtttctggggaaggctggcttctgccggctctttattcctggcttcgccgagatggcagcccctctgtaccctctgaccaagcccgggaccctgttcaactggggtcccgaccagcagaaggcctaccaggagatcaagcaggccctgctgaccgccccagccctgggcctgcctgatctcaccaagcccttcgagctgttcgtggacgagaagcagggctacgccaagggcgtgctgacccagaagctgggcccttggcggaggcccgtggcctacctgagcaagaagctggaccccgtggcagccggctggcctccttgcctgaggatggtggccgccatcgccgtgctcaccaaggacgccggcaagctgaccatgggccagcctctggtgatcctggcccctcacgccgtggaggctctggtgaagcagcctcccgacagatggctgagcaacgccaggatgacccactaccaggccctgcttctggacaccgacagggtgcagttcggcccagtggtggccctgaaccccgccaccctgctgcctctgcccgaggagggcctgcagcacaactgcctggacatcctggcagaggcccacggcacccggcctgatctgaccgatcagcctctgcccgacgccgaccacacctggtacaccgacggcagcagcctgctgcaggaggggcagaggaaggccggggccgccgtgaccaccgagaccgaggtgatctgggccaaggccctgcccgcagggacctccgcccagagggccgagctgatcgccctgacccaggccctgaagatggccgagggcaagaagctgaatgtgtacaccgacagccggtacgcattcgccaccgcccacatccacggggagatctaccggcggagggggtggctgaccagcgagggcaaggagatcaagaacaaggatgagatccttgccctgctgaaggctctgtttctgcctaagagactgagcatcatccactgccccggccatcagaagggccacagcgccgaggcccgggggaatcggatggccgaccaggccgccaggaaggccgccatcaccgagacccccgacaccagcaccctgctgatcgagaactcctcccccagcggcggttctaagagaaccgccgacgggagcgagttcgagcccaagaagaagcggaaggtgtga

SEQ ID NO: 467 - RNA, 2196 nt, synthetic construct
  misc_feature 1..2196: note = Description of Artificial Sequence: Synthetic polynucleotide
  source 1..2196: mol_type = other RNA
agcggcgggtctagcggcgggagctccggcagcgagaccccaggcaccagcgagtccgccacccccgagtctagcggcggcagctctgggggaagcagcaccctgaacatcgaggacgagtacaggctgcacgagaccagcaaggagcccgacgtgagtctgggctccacctggctgtccgacttcccccaggcctgggccgagaccgggggcatgggcctggccgtgaggcaggcccctctgatcatccctctgaaggccaccagcacccctgtgagcatcaagcagtaccccatgtcccaggaggctcggctgggcatcaagccccacatccagcggctgctggatcaggggatcctggtgccctgccagagcccctggaacaccccactgctgccagtgaagaagcctggcaccaatgattacaggcccgtgcaggacctcagagaggtgaacaagagggtggaggacatccaccctactgtgcccaacccctacaacctgctgagcggcctgcctcccagccaccagtggtacaccgtgctggatctgaaggacgcctttttctgcctgaggctgcaccccaccagccagccactgtttgccttcgagtggagggatcccgagatgggcatcagtggccagctgacctggaccaggctccctcagggcttcaagaacagccccaccctgttcaacgaggccctgcacagggacctggccgactttcggatccagcaccccgacctgatcctgctgcagtacgtggacgacctgctgctggcagccactagcgagctggactgccagcagggcaccagagccctgctgcagaccctgggcaacctgggctacagggcttcagccaagaaggcccagatctgccagaagcaggtgaagtatctgggctatctgctgaaggaggggcagcggtggctgaccgaggccaggaaggagaccgtcatgggccagcctaccccaaagactccccggcagctgagggagtttctggggaaggctggcttctgtcggctcttcattcctggcttcgcagagatggctgcccctctgtaccccctgaccaagcccgggaccctgttcaactggggcccagaccagcagaaggcttatcaggagatcaagcaggccctgctgaccgccccagccctgggcctgcctgacctgactaagcctttcgagctgttcgtggacgagaagcagggctacgccaagggcgtgctgacccagaagctgggcccttggcggcggcccgtggcctacctgtccaagaagctggaccccgtggccgccggctggccaccatgcctgcgcatggtggccgccatcgccgtgctgaccaaggacgccgggaagctgaccatgggccagcccctggtgatcctggcccctcacgcggtggaggccctggtgaagcagccacccgacaggtggctgtccaacgccaggatgacccactaccaggccctgctgctcgacaccgacagggtgcagttcggccccgtggtggccctgaaccccgccaccctgctgcccctgcccgaggagggcctgcagcacaactgcctggacatcctggcagaggcccacggcaccaggcccgacctgaccgaccagcctctgccagatgccgaccacacctggtacaccgacggcagtagcctgctgcaggaggggcagcggaaggccggggccgccgtgaccaccgagaccgaggtgatctgggccaaggccctgcccgccggcacctccgcccagagggccgagctgatcgccctgacccaggccctgaagatggccgagggcaagaagctgaatgtgtacaccgacagccgctacgccttcgccaccgcccacatccacggcgagatctacaggcggcggggatggctgaccagcgagggcaaggagatcaagaacaaggacgagatcctggccctgctgaaggccctgttcctgcccaagcggctgtccatcattcactgccccggccatcagaagggccacagtgccgaggccaggggcaatcggatggccgaccaggccgccagaaaggccgccatcaccgagacccctgacaccagcaccctgctgatcgagaactcctcccccagcggcggctccaagaggaccgccgacgggagcgagttcgagcctaagaagaagcggaaggtgtga

SEQ ID NO: 468 - RNA, 2196 nt, synthetic construct
  misc_feature 1..2196: note = Description of Artificial Sequence: Synthetic polynucleotide
  source 1..2196: mol_type = other RNA
agcgggggcagctccggggggagcagcggctccgagacccccggcacctccgagtctgccacccccgagagctctgggggaagcagcggtggcagctccaccctgaacatcgaggacgagtacaggctccacgagacctccaaggagcctgacgtgtccctgggcagcacctggctgtccgacttcccccaggcttgggccgagacagggggcatgggcctggccgtgcgccaggcccccctgatcatccccctgaaggccacaagcacccccgtgtctatcaagcagtaccccatgtcccaggaggctcggctgggcatcaagccccacatccagcggctgctggatcaggggatcctggtgccctgccagagcccctggaacacccccctgctgcccgtgaagaagcccggcaccaacgactatcgccccgtgcaggacctgcgcgaggtgaacaagagggtggaggacatccaccctaccgtgcccaacccctacaacctgctgagcgggctgccaccctcccaccagtggtacaccgtgctggacctgaaggatgccttcttctgtctgcggctgcaccccacctcccagcccctgttcgccttcgaatggcgggaccccgagatggggatcagcggccagctgacatggacccggctgccccagggcttcaagaacagccccacgctgttcaatgaggccctgcaccgggacctggcagacttcaggatccagcaccccgacctgatcctgctgcagtatgtggacgacctgctgctggccgccaccagcgagctggactgccagcagggcaccagggccctgctgcagaccctgggcaatctggggtacagggcctcagccaagaaggcccagatctgccagaagcaggtgaagtacctgggctatctgctgaaggagggtcagcggtggctgaccgaggccaggaaggagaccgtgatgggccagcctaccccaaagacccccaggcagctgagggagtttctggggaaggctggcttctgccggctcttcattcctggcttcgccgagatggccgcccccctgtaccccctgaccaagcccgggaccctgttcaactggggtcccgaccagcagaaggcctatcaggagatcaagcaggccctgctgaccgccccagccctgggcctgcctgacctgaccaagcccttcgagctgttcgtggacgagaagcagggctatgccaagggcgtgctgacccagaagctgggcccttggcggcggcccgtggcctacctgtccaagaagctggaccccgtggccgccgggtggccaccatgcctgcgcatggtggccgccatagccgtgctgaccaaggacgccgggaagctgaccatgggccagccactggtgatcctggccccacacgccgtggaggccctggtgaagcagccaccagaccggtggctgagcaacgccaggatgacccactaccaggccctcctgctggacacagacagggtgcagttcgggccagtggtggccctgaaccctgccaccctgctgcccctgccagaggagggcctgcagcacaactgcctggacatcctggccgaggcccatggcacccggccagacctgacagaccagcccctgcccgacgccgaccacacctggtacaccgacggcagcagcctgctgcaggagggccagaggaaggccggcgccgccgtgaccaccgagaccgaggtgatctgggccaaggccctgcccgctgggaccagcgcccagcgggcagagctgattgccctcacccaggccctgaagatggccgagggcaagaagctgaacgtgtacacggacagccggtacgccttcgccaccgcccacatccacggcgagatctaccggcgcaggggctggctgaccagcgagggcaaggagatcaagaacaaggatgagatcctggccctgctgaaggccctgttcctgcccaagcggctgagcatcatccactgccctgggcaccagaagggccactcagcagaggccagggggaacaggatggccgaccaggcggccaggaaggccgccatcaccgagacccccgataccagcaccctgctgatcgagaactcctctcccagcggcggctccaagaggaccgccgatgggagcgagttcgagcccaagaagaagcggaaggtgtga

SEQ ID NO: 469 - RNA, 2196 nt, synthetic construct
  misc_feature 1..2196: note = Description of Artificial Sequence: Synthetic polynucleotide
  source 1..2196: mol_type = other RNA
agcggggggtctagcggcggcagcagcggcagcgagacccccgggaccagcgagtcagccactcccgagagctccgggggctcctctggaggctccagcaccctgaacatcgaggacgagtacaggctgcacgagacctccaaggagcccgacgtgagcctcgggagcacctggctgtccgacttcccccaggcctgggccgagaccggcggcatgggcctggccgtgaggcaggcccctctcatcatccctctgaaggccaccagcacccctgtgagcatcaagcagtaccccatgtcccaggaggctcggctgggcatcaagccccacatccagcggctgctggatcaggggatcctggtgccctgccagagcccctggaacaccccactgctgcccgtgaagaagccgggcaccaatgattacaggcccgtgcaggacctgagggaggtgaacaagcgggtggaggatatccaccccaccgtgcccaatccttacaacctgctgagcggcctgcctcccagccaccagtggtacaccgtgctggacctgaaggacgccttcttctgtctgcggctgcaccccaccagccagcctctgttcgccttcgaatggagggatcccgagatggggatcagcggacagctgacctggaccaggctccctcagggcttcaagaacagccccaccctgttcaatgaggccctgcacagggacctggccgacttcaggatccagcaccccgacctgatcctgctgcagtacgtggacgacctgctgctggccgccactagtgagctggactgccagcagggcaccagagccctgctgcagaccctgggcaatctggggtacagggcctcggccaagaaggcccagatctgccagaagcaggtgaagtacctgggctacctcctgaaggagggtcagcggtggctgaccgaggccaggaaggagaccgtgatgggccagcctaccccaaagacccccaggcagctgcgggagtttctggggaaggctggcttctgccggctcttcattcctggcttcgccgagatggccgcccccctgtaccccctgaccaagcccgggaccctgttcaactggggccccgaccagcagaaggcctaccaggagatcaagcaggccctgctgaccgccccagccctgggcctgcctgatctcaccaagcccttcgagctgttcgtggacgagaagcagggctacgccaagggcgtgctgacccagaagctgggcccttggcggcggccagtggcctacctgtccaagaagctggaccccgtggccgctggctggccaccatgcctgcgcatggtggccgccatcgccgtgctgaccaaggacgccgggaagctgaccatgggtcagcccctggtgatcctggctccccacgccgtggaggccctggtgaagcagccacccgaccggtggctgtccaacgccaggatgacccactaccaggccctgctgctggacaccgacagggtgcagttcggccctgtggtggccctgaaccccgccacgctgctgcccctccccgaggaggggctgcagcacaactgcctggacatcctggcagaggcccacggcaccaggcccgacctgaccgaccagcctctgccagatgccgaccacacctggtacaccgacggcagcagcctgctgcaggagggccagcggaaggccggggccgccgtgaccaccgagaccgaggtgatctgggccaaggccctgcccgctggcacctccgcccagcgggccgagctgatcgccctgacccaggccctgaagatggccgagggcaagaagctgaacgtgtataccgacagccggtatgccttcgccaccgcccacatccatggagagatctataggaggcggggctggctgaccagcgagggcaaggagatcaagaataaggatgagatcctggccctgctgaaggccctgttcctgcctaagaggctgagcatcatccactgccccggccatcagaagggccacagtgccgaggcccgggggaaccggatggccgaccaggccgccaggaaggccgccatcacggagacccccgacaccagcaccctgctgatcgagaactcctctcccagcggcggctccaagaggaccgccgatgggagcgagttcgagcccaagaagaagcggaaggtgtga

SEQ ID NO: 470 - RNA, 2196 nt, synthetic construct
  misc_feature 1..2196: note = Description of Artificial Sequence: Synthetic polynucleotide
  source 1..2196: mol_type = other RNA
agcggaggcagctccgggggaagcagcggcagcgagaccccagggacctctgagtccgccacccccgagagcagcggggggagcagcggaggctccagcaccctgaacatcgaggacgagtacaggctgcacgagacctccaaggagccagacgtgtccctggggtccacctggctgtccgacttcccccaggcctgggctgagaccggcggcatgggactggcagtgcgccaggctcccctgatcatccccctgaaggccaccagcaccccggtgtccatcaagcagtacccaatgagccaggaggctcggctgggcatcaagcctcacatccagaggctgctggatcaggggatcctggtgccctgccagtccccctggaacaccccactgctgcccgtcaagaagcccgggaccaacgactacaggccagtgcaggacctgagggaggtgaacaagagggtggaggacatccaccctactgtgcctaacccttacaacctgctgtctggcctgccccccagccatcagtggtacacggtgctggatctgaaggatgcctttttctgcctgaggctgcaccccaccagccagcctctgttcgccttcgagtggcgggacccagagatgggcatcagcggccagctgacctggaccaggctccctcagggcttcaagaacagccccaccctgttcaatgaggccctgcacagggacctggccgactttcggatccagcaccctgacctgatcctgctgcagtacgtggacgacctgctgctggccgccaccagcgagctggactgccagcagggcaccagagccctgctgcagaccctggggaacctgggctatagggcctctgccaagaaggcccagatctgtcagaagcaggtgaagtacctgggctacctgctgaaggagggccagcggtggctgacagaggcccgcaaggagaccgtgatgggccagcccacccccaagacccctcggcagctgagggagttcctgggcaaggccggcttctgcaggctgttcatccccgggttcgccgagatggccgcccccctgtaccccctgaccaagccaggcaccctgttcaactgggggcccgaccagcagaaggcctatcaggagatcaagcaggccctgctgaccgccccagccctgggcctgcctgacctgaccaagcccttcgagctgttcgtggacgagaagcaggggtacgccaagggcgtgctgacccagaagctgggcccttggcggcggcccgtggcctacctgagcaagaagctggaccccgtggcagccggctggcctccttgtctgcgcatggtggccgccatcgccgtgctgaccaaggacgccggcaagctgaccatgggccagcctctggtgatcctggccccacacgccgtggaggccctggtgaagcagccacctgacaggtggctgtccaacgccaggatgacccactatcaggccctcctgctggacacagacagagtgcagttcgggccagtggtggccctgaaccctgccactctgctgcccctgccagaggagggcctgcagcacaactgcctggacatcctggccgaggcccacggcactcggccagacctgacagaccagcccctgcccgacgccgaccacacctggtacaccgacggcagcagcctgctgcaggagggccagaggaaggccggcgccgccgtgaccaccgagaccgaggtgatctgggccaaggccctgccagccggcacctctgcccagagggccgagctgatcgccctgacccaggccctgaagatggccgagggcaagaagctgaatgtgtacaccgactcccggtacgcattcgctaccgcccacatccacggcgagatctaccggcgcaggggctggctgaccagcgaggggaaggagatcaagaacaaggacgagatcctggccctgctgaaggccctgttcctgccaaagcggctgagcatcatccactgccctggccaccagaagggccactcagcagaggcccgcggcaaccggatggccgaccaggccgcccggaaggccgccatcaccgagacccccgacaccagcaccctgctgatcgagaactcctccccctccggcggcagcaagcgcaccgccgacgggagcgagttcgagcccaagaagaagcggaaggtgtga

SEQ ID NO: 471 - RNA, 2196 nt, synthetic construct
  misc_feature 1..2196: note = Description of Artificial Sequence: Synthetic polynucleotide
  source 1..2196: mol_type = other RNA
tccggggggtctagcggcggcagcagcggcagcgagacccccgggaccagcgagagtgctaccccagagagctccggcggcagctccggcggctccagcaccctgaacatcgaggacgagtacaggctgcacgagaccagcaaggagcccgacgtgagcctggggagcacctggctgagcgacttccctcaggcctgggccgagaccggggggatgggcctggccgtgcgccaggcccccctgatcatccccctgaaggccaccagcacccctgtgtccatcaagcagtaccccatgtcccaggaggctcggctgggcatcaagccccacatccagcggctgctggatcaggggatcctggtgccctgccagagcccctggaacaccccactgctgccggtgaagaagcccggcaccaacgactacaggcccgtgcaggacctgagggaggtcaacaagagggtggaggacatccaccctactgtgcccaacccctacaacctgctgagcggcctgccacccagccaccagtggtacaccgtgctggacctgaaggacgcctttttctgtctgagactgcaccctacctctcagcctctgtttgccttcgagtggagggatccagagatgggcatcagcggccagctgacctggacccgcctgccccagggcttcaagaacagccccacgctgttcaatgaggccctgcacagagacctggccgacttcaggatccagcaccccgacctgatcctgctgcagtacgtggacgacctgctgctggccgccaccagcgagctggactgccagcagggcacccgggccctgctgcagaccctgggcaatctgggctatcgggccagcgccaagaaggcccagatctgccagaagcaggtgaagtacctgggctacctgctgaaggagggccagcggtggctgaccgaggccaggaaggagaccgtgatgggccagcctaccccaaagacccccaggcagctgagggagtttctggggaaggctggcttctgccggctcttcattcctggcttcgctgagatggccgccccactgtaccccctgaccaagccagggaccctgttcaactggggccccgaccagcagaaggcctatcaggagatcaagcaggccctgctgaccgccccagccctgggcctgcctgacctgaccaagcccttcgagctgttcgtggacgagaagcagggctacgccaagggcgtgctgacccagaagctgggcccttggcggcgccctgtggcctatctcagcaagaagctggaccccgtggcagccggctggcctccttgtctgcgcatggtggccgccatcgccgtgctgaccaaggacgccggcaagctgaccatgggccagcctctggtgatcctggccccccacgccgtggaggctctggtgaagcagccacccgacaggtggctgtccaacgccaggatgacccactaccaggccctcctgctggacaccgacagggtgcagttcggccctgtggtggccctgaaccccgccaccctgctgcccctgccagaggagggcctgcagcacaactgcctggacatcctggccgaggcccacggcaccaggccagacctgacagaccagcccctgcctgacgccgaccacacctggtacaccgacggcagcagcctgctgcaggagggccagaggaaggccggcgccgccgtgaccaccgagaccgaggtgatctgggcgaaggctctgcccgctgggaccagcgcccagcgggcagagctgatcgccctgacccaggccctgaagatggccgagggcaagaagctgaatgtgtacaccgacagccggtacgcattcgccactgcccacatccacggcgagatctacaggcggaggggctggctgaccagcgagggcaaggagatcaagaacaaggacgagatcctggccctgctgaaggccctgtttctgcccaagcggctgagcatcatccactgccccggccaccagaagggccacagcgccgaggcccgggggaatcggatggccgaccaggccgcccggaaggccgccatcaccgagacccccgacaccagcaccctgctgatcgagaactcctcccccagcggcgggagcaagcgcaccgccgacgggagcgagttcgagcctaagaagaagcggaaggtgtga

SEQ ID NO: 472 - RNA, 2196 nt, synthetic construct
  misc_feature 1..2196: note = Description of Artificial Sequence: Synthetic polynucleotide
  source 1..2196: mol_type = other RNA
agcggcgggagctccggcggcagctccgggagcgagactcctggcaccagcgagtccgccactcccgagagctccggcggcagctccggcggcagcagcaccctgaacatcgaggacgagtacaggctgcacgagaccagcaaggagcccgacgtgagtctgggctccacctggctctccgacttcccacaggcctgggccgagaccgggggcatggggctggccgtgaggcaggcccccctgatcatccctctgaaggccacctccacccccgtgtctatcaagcagtaccccatgtcccaggaggctcggctgggcatcaagccccacatccagcggctgctggatcaggggatcctggtgccctgccagagcccctggaacaccccactgctgcccgtgaagaagcccgggaccaacgactaccggcccgtgcaggacctgcgggaggtcaacaagagggtggaggacatccaccctaccgtgcccaacccctacaacctgctgagtggcttgcccccaagccaccagtggtacaccgtgctggacctgaaggacgccttcttctgcctgcggctgcaccccaccagccagcctctgttcgccttcgaatggagggacccagagatgggcatcagcgggcagctgacctggaccaggctgcctcagggcttcaagaacagccccaccctgttcaatgaggccctgcacagggacctggccgacttcaggatccagcaccccgacctgatcctgctgcagtacgtggacgacctgctgctggccgccaccagcgagctggactgccagcagggcaccagagccctgctgcagaccctggggaatctgggctacagggccagcgccaagaaggcccagatttgccagaagcaggtgaagtacctgggctacctgctgaaggagggccagcggtggctgaccgaggctcggaaggagacagtgatggggcagccaacccccaagactccccggcagctgcgggagttcttgggcaaggccggcttctgccggctgttcattcccggcttcgccgagatggctgccccactgtaccctctgaccaagcccggcaccctcttcaactggggcccagaccagcagaaggcttatcaggagatcaagcaggccctgctgaccgccccagccctgggcctgcctgacctgactaagcctttcgagctgttcgtggacgagaagcagggctacgccaagggcgtgctgacccagaagctgggcccttggcgccggccggtggcctacctgtccaagaagctggaccccgtggccgccggctggcctccttgcctgaggatggtggccgccatcgccgtgctcaccaaggacgccgggaagctgaccatggggcagcccctggtcatcctggcgccccacgccgtggaggccctggtgaagcagccacctgacaggtggctgtccaacgccaggatgacccactaccaggccctgctgctggacaccgacagggtgcagttcggccccgtggtggccctgaaccccgccactctgctgcccctgcccgaggagggcctgcagcacaactgcctggacattctggccgaggcccacggcactcggccagacctgaccgatcagcctctgcccgacgctgatcacacctggtacacagacggcagcagcctgctgcaggaggggcagcggaaggccggggccgccgtgaccaccgagaccgaggtgatctgggccaaggccctgcccgcagggacctccgcccagagggccgagctgatcgccctgacccaggccctgaagatggccgagggcaagaagctgaatgtgtacaccgacagccgctacgccttcgccaccgcccacatccacggcgagatctaccggcggcggggatggctgaccagcgagggcaaggagatcaagaacaaggatgagatcctggccctgctgaaggccctgttcctgcccaagcggctgtccatcattcactgccccggccatcagaagggccacagcgctgaggccaggggcaacaggatggccgaccaggccgccagaaaggccgccatcactgagacccctgacaccagcaccctgctgatcgagaacagcagccccagcggcggctccaagaggaccgccgatgggagcgagttcgagcccaagaagaagcggaaggtgtga

SEQ ID NO: 473 - RNA, 2196 nt, synthetic construct
  misc_feature 1..2196: note = Description of Artificial Sequence: Synthetic polynucleotide
  source 1..2196: mol_type = other RNA
agcggggggagcagcggggggagctcagggtctgagacccccggcaccagcgagtctgccacccctgagagcagcgggggcagctccgggggctccagcaccctgaacatcgaggacgagtacagactgcacgagaccagcaaggagcccgacgtgagtctgggctccacctggctgtctgactttcctcaggcctgggccgagaccggcggcatgggcctggccgtgcgccaggcccccctgatcatccccctgaaggccaccagcacccccgtgagcatcaagcagtaccccatgtcccaggaggctcggctgggcatcaagccccacatccagcggctgctggatcaggggatcctggtgccctgccagagcccctggaacaccccactgctgccagtgaagaagcctggcaccaacgactatcgccccgtgcaggacctgcgcgaggtgaacaagagggtggaggacatccaccctactgtgcccaacccttacaacctgctgagtggcctgccccccagccaccagtggtacaccgtgctggacctgaaggacgcctttttctgtctgcggctgcaccccaccagccagcctctgttcgccttcgagtggcgggacccagagatgggcatctccggccagctgacctggacccggctgccccagggcttcaagaacagccccacgctgttcaatgaggccctgcacagagacctggccgacttcaggatccagcaccccgacctgatcctgctgcagtacgtggacgacctgctgctggcagccactagtgagctggactgccagcagggcaccagagccctgctgcagaccctgggcaacctgggctacagggccagcgctaagaaggcccagatctgccagaagcaggtgaagtacctgggctacctgctgaaggagggccagcgctggctgaccgaggctaggaaggagacagtgatggggcagccaacccccaagactccccggcagctgcgggagtttctcggcaaggccgggttctgcagactgttcatccccggctttgccgagatggctgccccactgtaccctctgaccaagcccggcaccctgttcaactggggcccagaccagcagaaggcctatcaggagatcaagcaggccctgctgaccgccccagccctgggcctgcctgacctgaccaagcccttcgagctgttcgtggacgagaagcagggctacgccaagggcgtgctgacccagaagctgggcccttggcggaggcccgtggcctacctgagcaagaagctggaccccgtggcagccggctggcctccttgtctgcgcatggtggccgccatcgccgtgctgaccaaggacgccggcaagctgaccatgggccagcctctggtgatcctggccccacacgccgtggaggccctggtgaagcagccacctgacaggtggctgtccaacgccaggatgacccactaccaggccctgctgctcgacaccgacagggtgcagttcggccctgtggtggcgctgaatccagccaccctgctgcccctccccgaggaggggctgcagcacaactgcctggatatcctggccgaggcccacggcaccaggccggacctgaccgaccagcccctgcctgatgccgaccacacctggtacaccgacggctccagcctgctgcaggagggccagcggaaggctggagccgccgtgaccaccgagaccgaggtgatctgggccaaggccctgcccgccggcaccagcgcccagagggccgagctgatcgccctgacccaggccctgaagatggccgagggcaagaagctgaacgtgtacaccgacagccggtacgccttcgccaccgcccacatccacggcgagatctacaggcgcaggggctggctgaccagcgagggcaaggagatcaagaacaaggacgagatcctggccctgctgaaggccctgttcctgcccaagcgcctgtccatcatccactgccccggccatcagaagggccacagtgccgaggcccgggggaatcggatggccgaccaggccgccaggaaggccgccatcaccgagacccccgacaccagcaccctgctgatcgagaactcctctcccagcggcggctccaagaggaccgccgatgggagcgagttcgagcccaagaagaagcggaaggtgtga

SEQ ID NO: 474 - RNA, 2196 nt, synthetic construct
  misc_feature 1..2196: note = Description of Artificial Sequence: Synthetic polynucleotide
  source 1..2196: mol_type = other RNA
agcggggggagctccggaggttccagcgggtccgagacccctggaacctccgagagcgctacccccgagagcagcggcggcagctccgggggtagcagcaccctgaacatcgaggacgagtacaggctgcacgagacctccaaggagcccgacgtgagtctgggctccacctggctgtccgacttcccccaggcctgggctgagaccggcggcatgggcctggccgtgagacaggccccactgatcatcccactgaaggccaccagcaccccagtgagcatcaagcagtaccccatgtctcaggaggccaggctggggatcaagccccacatccagaggctgctggaccagggcatcctggtgccctgccagagcccctggaacacccccctgctgccggtcaagaagcccgggaccaacgactacaggcccgtgcaggacctgcgggaggtgaataagagagtggaggacatccaccccaccgtccccaatccttacaacctcctgtcaggcctgccacccagccaccagtggtacaccgtgctggatctgaaggatgcctttttctgcctgaggctgcaccccaccagccagcctctgttcgccttcgagtggcgggacccagagatgggcatcagcggccagctgacctggaccaggctccctcagggcttcaagaacagccccaccctgttcaatgaggccctgcacagggacctggccgactttcggatccagcaccccgacctgatcctgctgcagtacgtggacgacctgctgctggccgccaccagcgagctggactgccagcagggcaccagagccctgctgcagaccctggggaatctgggctatcgggccagcgccaagaaggcccagatttgccagaagcaggtcaagtacctgggctatctgctgaaggagggacagaggtggctgaccgaggccaggaaggagaccgtgatgggccagcctaccccaaagacccccaggcagctgcgggagtttttggggaaggctggcttctgccggctgttcattcctggcttcgccgagatggcagcccctctgtaccctctgaccaagcctgggaccctgttcaactggggcccagatcagcagaaggcctaccaggagatcaagcaggccctgctgaccgccccagccctgggcctgcctgatctgaccaagcccttcgagctgttcgtggacgagaagcagggctacgccaagggcgtgctgacccagaagctgggcccatggcggcggcccgtggcctacctgtccaagaagctggaccccgtggccgcgggctggccaccatgcctgcgcatggtggccgccatcgccgtcctgaccaaggacgccggcaagctgaccatgggccagcctctggtgatcctggccccacacgccgtggaggccctggtgaagcagccacctgacaggtggctgtccaacgccaggatgacccactatcaggccctgcttctggacaccgacagggtgcagttcggccctgtggtggccctgaacccggccaccctgctgcccctccccgaggaggggctgcagcacaactgcctcgacatcctggccgaggcccacggcaccaggcctgatctgaccgatcagcccctgcctgatgccgaccacacctggtacaccgacggcagcagcctgctgcaggaggggcagaggaaggccggggccgccgtgaccaccgagaccgaggtgatctgggccaaggccctgcctgccggcacctctgcccagagggccgagctgatcgccctgacccaggccctgaagatggccgagggcaagaagctgaacgtgtacaccgacagccggtacgccttcgccaccgcccacatccacggcgagatctacaggcgccggggctggctgaccagcgagggcaaggagatcaagaacaaggacgagatcctggccctgctgaaggccctgttcctgcccaagcgcctgagcatcatccactgccccggccatcagaagggccacagcgccgaggcccgggggaatcggatggccgaccaggccgccaggaaggcggccatcaccgagacccccgacacctccactctgctgatcgagaacagcagccccagtgggggctccaagcgcactgccgacggcagtgagtttgagcccaagaagaagcggaaggtgtga

SEQ ID NO: 475 - RNA, 2196 nt, synthetic construct
  misc_feature 1..2196: note = Description of Artificial Sequence: Synthetic polynucleotide
  source 1..2196: mol_type = other RNA
agcggcggcagctctggcggctcctctgggagcgagacccctggcaccagcgagtccgccacccccgagagctccggcgggagctccggggggtcctccaccctgaacatcgaggacgagtaccgcctgcatgagacctctaaggagcctgacgtgagtctgggcagcacctggctgtccgacttccctcaggcctgggccgagaccggggggatgggcctggccgtgcgccaggcccccctgatcatccccctgaaggccaccagcacccctgtgagcatcaagcagtaccctatgagccaggaggccaggctgggcatcaagccccacatccagaggctgctggaccagggcatcctggtgccctgccagagcccctggaacaccccactgctgccagtgaagaagcctggcaccaacgactacaggcctgtgcaggacctgagggaggtgaacaagagggtggaggacatccaccctactgttcccaatccctacaacctgctgtcaggcctgcctcctagccatcagtggtacaccgtgctggatctgaaggacgccttcttctgtctgcggctgcaccccacctcccagccactgttcgccttcgagtggcgggaccccgagatggggatcagcggccagctgacatggaccaggctccctcagggcttcaagaacagccccaccctgttcaatgaggccctgcacagggacctggccgactttcggatccagcacccagatctgatcctgctgcagtacgtggacgacctgctgctggccgccaccagcgagctggactgccagcagggcaccagagccctgctgcagaccctggggaatctgggctatcgggccagcgccaagaaggcccagatttgccagaagcaggtgaagtatctgggctacctgctgaaggagggacagaggtggctgaccgaggccaggaaggagaccgtgatgggccagcctaccccaaagacccccaggcagctgcgggagtttctggggaaggctggcttctgccggctgttcattcctggcttcgccgagatggccgcccctctgtaccccctgaccaagcccgggaccctgttcaactggggtcccgaccagcagaaggcctaccaggagatcaagcaggccctgctgaccgccccagccctgggcctgcctgatctgaccaagcccttcgagctgttcgtggacgagaagcagggctacgccaagggcgtgctgacccagaagctgggcccttggcggcggcccgtggcctacctgtccaagaagctggaccccgtggccgccggctggccaccatgcctgcgcatggtggccgccatcgccgtgctgaccaaggacgccgggaagctgaccatgggccagcccctggtgatcctggccccacacgccgtggaggccctggtgaagcagccacctgacaggtggctgtccaacgccaggatgacccactaccaggccctgcttctggacaccgacagggtgcagttcggcccagtggtggccctgaaccccgccaccctgctgcccctgcccgaggaggggctgcagcacaactgtctggacatcctggccgaggctcacggcacccggcccgacctgacagaccagcctctgcccgacgccgaccacacctggtacaccgacggcagcagcctgctgcaggagggccagcggaaggccggagccgccgtgaccaccgagacagaggtgatctgggccaaggccctgcccgccgggacctccgcccagagggccgagctgatcgccctgacccaggccctgaagatggccgagggcaagaagctgaacgtgtacactgacagcaggtacgcgttcgccaccgcccacatccacggcgagatctacaggcggcggggatggctgaccagcgagggcaaggagatcaagaacaaggatgagatcctggccctgctgaaggccctgttcctgcccaagcgcctgtccatcatccactgccccggccatcagaagggccactctgctgaggcccgcggcaaccggatggccgaccaggccgcccggaaggccgccatcacagagacccccgataccagcaccctgctgatcgagaactccagccccagcggcgggagcaagcgcaccgccgacggcagcgagttcgagcctaagaagaagcggaaggtgtga

SEQ ID NO: 476 - RNA, 2196 nt, synthetic construct
  misc_feature 1..2196: note = Description of Artificial Sequence: Synthetic polynucleotide
  source 1..2196: mol_type = other RNA
agcggaggctccagcggcggcagctccggcagcgagactccagggactagcgagtccgctacccctgagtctagcggcggcagcagcggcggctccagcaccctgaacatcgaggacgagtacaggctgcacgagacctccaaggagcctgacgtgtccctgggctccacctggctgagcgacttccctcaggcctgggccgagacaggggggatggggctggccgtgcgccaggcccccctgatcatcccactgaaggccactagcaccccagtgagcatcaagcagtaccccatgagccaggaggcccgcctgggcatcaagccccatatccagaggctgctggaccagggcatcctggtgccctgccagagcccctggaacacccccctgctgcccgtgaagaagcccgggaccaacgactacaggcccgtgcaggatctgcgcgaggtgaacaagagggtggaggacatccaccccaccgtgccaaatccttacaacctgctgagcgggctgccccccagccaccagtggtacaccgtgctggacctgaaggacgccttcttctgcctgcggctgcaccccaccagccagcctctgttcgccttcgaatggagggatcccgagatggggatcagcgggcagctgacctggacccggctgccccagggcttcaagaacagccccaccctgttcaatgaggccctgcaccgggacctggccgacttcaggatccagcaccccgacctgatcctcctgcagtacgtggacgacctgctgctggcagccaccagcgagctggactgccagcagggcaccagagccctgctgcagaccctgggcaacctggggtacagggcctctgccaagaaggcccagatctgccagaagcaggtgaagtacctgggctacctgctgaaggagggtcagcggtggctgacagaggccaggaaggagaccgtgatgggccagcctaccccaaagacccccaggcagctgagggagtttctggggaaggctggcttttgcaggctgttcatccccggcttcgccgagatggcagcccccctgtaccctctgaccaagccgggcaccctgttcaactggggccccgaccagcagaaggcctatcaggagatcaagcaggccctgctgaccgccccagccctgggcctgcctgacctgaccaagcccttcgagctgttcgtggacgagaagcagggctacgccaagggcgtgctgacccagaagctgggcccttggcggaggcccgtggcctacctgtccaagaagctggaccccgtggcagccggctggcctccttgtctgcgcatggtggccgccatcgccgtgctgaccaaggacgccggcaagctgaccatgggccagcctctggtcatcctggccccacacgccgtggaggccctggtgaagcagccacctgacaggtggctgtccaacgccaggatgacccactaccaggccctgcttctcgacaccgacagggtgcagttcggccccgtggtggccctgaaccccgccactctgctgcccctgcccgaggagggcctgcagcacaactgcctggacatcctggcagaggcccacggcaccaggcccgacctgaccgaccagcctctgccagatgccgaccacacctggtacaccgacggcagcagcctgctgcaggaggggcagcggaaggccggggccgccgtgaccaccgagaccgaggtgatctgggccaaggccctgcccgccgggacctccgcccagagggccgagctgatcgccctgacccaggccctgaagatggccgagggcaagaagctgaatgtgtacacagacagccgctatgccttcgccactgcccacatccacggcgagatctaccgccggaggggctggctgaccagcgagggcaaggagatcaagaacaaggacgagatccttgccctgctgaaggccctgttcctgcccaagcggctgtccatcatccattgccccgggcaccagaagggccactccgctgaggcccggggcaataggatggcggaccaggccgccaggaaggccgccatcaccgagacccccgacaccagcaccctgctgatcgagaacagcagcccctccggcggcagcaagaggaccgccgacgggagcgagttcgagcccaagaagaagaggaaggtgtga

SEQ ID NO: 477 - RNA, 2196 nt, synthetic construct
  misc_feature 1..2196: note = Description of Artificial Sequence: Synthetic polynucleotide
  source 1..2196: mol_type = other RNA
agcggcggctctagcggcgggagcagcggctccgagacccccggcacctccgagtccgctactcccgagagctccggcggctccagcggcgggtctagcactctgaacatcgaggacgagtaccggctgcacgagaccagcaaggagcccgacgtgagcctgggcagcacctggctgtccgacttcccccaggcctgggccgagaccggcggcatgggcctggccgtgaggcaggcccctctgatcatccccctgaaggccaccagcacccctgtgtcaatcaagcagtaccccatgtcccaggaggctcggctgggcatcaagccccacatccagcggctgctggatcagggcatcctggtgccctgccagagcccctggaacaccccactgctgccagtgaagaagcctggcaccaatgactacaggcccgtgcaggacctcagggaggtgaacaagagggtggaggacatccaccctaccgtgcccaacccctacaacctgctgagcggcctgcctcccagccaccagtggtacaccgtgctggacctgaaggacgccttcttctgcctgaggctgcaccccaccagccagcccctgttcgccttcgagtggagagacccagagatggggatctccgggcagctgacctggacccggctgccccagggcttcaagaacagccccaccctgttcaatgaggccctgcacagggacctggctgacttcaggatccagcaccccgacctgatcctgctgcagtacgtggacgacctgctgctggcagccaccagtgagctggactgccagcagggcaccagagccctgctgcagaccctggggaatctgggctatcgggccagcgccaagaaggcccagatttgccagaagcaggtgaagtacctgggctacctgctgaaggaggggcagcggtggctcaccgaggccaggaaggagacagtgatgggccagcctaccccaaagacccccaggcagctgcgggagtttctggggaaggctggcttctgtcggctgtttattcctggcttcgctgagatggctgcccctctgtaccccctgaccaagcctggcaccctgttcaactggggccccgaccagcagaaggcctatcaggagatcaagcaggccctgctgaccgccccagccctgggcctgcctgacctgaccaagcccttcgagctgttcgtggacgagaagcagggctatgccaagggggtgctgacccagaagctgggcccttggaggaggcccgtggcctacctgtccaagaagctggaccccgtggcagccggctggcctccttgtctgcgcatggtggccgccatcgccgtgctgaccaaggacgccggcaagctgaccatgggccagcccctggtcatcctggccccacacgccgtggaggccctggtgaagcagccacccgaccggtggctgtccaacgccaggatgacccactaccaggccctgcttctggacaccgacagggtgcagttcggccctgtggtggccctgaaccccgccaccctgctgcccctccccgaggaggggctgcagcacaactgcctggacatcctggccgaggcccacggcaccaggcctgatctgaccgatcagcccctgcctgatgccgaccacacctggtacaccgacggctccagccttctgcaggagggccagcggaaggccggagccgcggtgaccaccgagaccgaggtgatctgggccaaggccctgcctgccgggaccagcgcccagagggccgagctgatcgccctgacccaggccctgaagatggccgagggcaagaagctgaacgtgtacaccgacagccggtacgcgttcgccaccgcccacatccacggcgagatctacaggcggcggggatggctgaccagcgagggcaaggagatcaagaacaaggacgagatccttgccctgctgaaggccctgttcctgcccaagcgcctgtccatcattcattgccccggccatcagaagggccactcagcagaggccagggggaacaggatggccgaccaggccgcccggaaggccgccatcacagagacccccgacactagcaccctgctgatcgagaacagcagccctagcgggggctctaagcggaccgccgacggcagcgagttcgagcccaagaagaagcggaaggtgtga

SEQ ID NO: 478 - RNA, 2196 nt, synthetic construct
  misc_feature 1..2196: note = Description of Artificial Sequence: Synthetic polynucleotide
  source 1..2196: mol_type = other RNA
tccggcggctcctcaggcggctcctctggcagcgagactcctggcaccagcgagtccgccacccccgagagcagcggcggcagctccgggggctccagcaccctgaacatcgaggacgagtacaggctgcacgagaccagcaaggagcccgacgtgagcctggggagcacctggctgtctgacttccctcaggcctgggccgagaccggggggatgggcctggccgtgcgccaggcccccctgatcatccccctgaaggccaccagcacccctgtgtccatcaagcagtaccccatgtcccaggaggctcggctgggcatcaagccccacatccagcggctgctggatcaggggatcctggtgccctgccagagcccctggaacaccccactgctgcccgtgaagaagcccgggaccaacgactacaggcccgtgcaggacctgagggaggtcaacaagagggtggaggacatccaccctaccgtgccaaacccctacaacctgctgtctgggctgccgcccagccaccagtggtacaccgtgctggacctgaaggacgccttcttctgcctgcggctgcaccccacctctcagcctctcttcgccttcgagtggagagaccctgagatggggatcagcgggcagctgacctggactcggctgccccagggcttcaagaacagccccaccctgttcaatgaggccctgcacagggacctggccgacttcaggatccagcaccccgacttgatcctgctgcagtacgtggacgacctgctgctggccgccaccagcgagctggactgccagcagggcaccagagccctgctgcagaccctggggaatctgggctatcgggccagcgccaagaaggcccagatttgccagaagcaggtcaagtacctgggctatctgctgaaggaggggcagcgctggctcaccgaggcccggaaggagaccgtgatgggccagcctaccccaaagactccccggcagctgcgggagtttctggggaaggccggcttctgccggctgttcatcccaggctttgcagagatggcagcccccctgtaccctctgacaaagcctgggaccctgttcaactggggccccgaccagcagaaggcctaccaggagatcaagcaggccctgctgaccgccccagccctgggcctgcctgatctgaccaagccattcgagctgtttgtggacgagaagcagggctacgccaagggcgtgctgacccagaagctgggcccttggcggaggcccgtggcctacctgtccaagaagctggaccccgtggcagccggctggcctccttgtctgcgcatggtggccgccatcgctgtgctgaccaaggacgccggcaagctgaccatgggccagcctctggtcatcctggcccctcacgccgtggaggctctggtgaagcagcctcccgacagatggctgagcaacgccaggatgacccactaccaggccctgcttctggacacagacagggtgcagttcggcccagtggtggccctgaacccggccaccctgctgcctctgccagaggagggcctgcagcacaactgcctggacattctggcagaggcccacggcacccggcctgacctgaccgaccagcccctgcccgacgctgaccacacctggtacaccgacggcagcagcctgctgcaggagggtcagaggaaggccggggccgccgtgaccaccgagaccgaggtgatctgggccaaggccctgcctgcagggacctccgcccagagggccgagctgatcgccctgacccaggccctgaagatggccgagggcaagaagctgaatgtgtacaccgatagcaggtacgcattcgccaccgcccacatccacggcgagatctacaggcgcaggggctggctgaccagcgagggcaaggagatcaagaacaaggacgagatcctggccctgctgaaggccctgttcctgcccaagcgcctgtccatcatccactgccccggccatcagaagggccacagtgccgaggcccgggggaatcggatggccgaccaggccgccaggaaggccgccatcaccgagacccccgacaccagcaccctgctgatcgagaactcctctcccagcggcggctccaagaggaccgccgatgggagcgagttcgagcccaagaagaagcggaaggtgtga

SEQ ID NO: 479 - RNA, 2196 nt, synthetic construct
  misc_feature 1..2196: note = Description of Artificial Sequence: Synthetic polynucleotide
  source 1..2196: mol_type = other RNA
agcgggggcagctctggcggctcttctggcagcgagacccctggcaccagcgagagcgccaccccagagagcagtggcggctcctctggaggctccagcaccctgaacatcgaggacgagtacaggctgcacgagacctccaaggagcccgacgtgtctctggggtccacctggctgtccgacttcccgcaggcctgggcagagaccggtggcatgggcctggccgtgcgccaggcccccctgatcatcccactgaaggccaccagcaccccggtgtccatcaagcagtaccccatgtcccaggaggctcggctgggcatcaagccccacatccagcggctgctggatcaggggatcctggtgccctgccagagcccctggaacacccccctgctgccagtgaagaagccagggaccaatgactaccggcctgtgcaggacctgcgggaggtcaacaagagggtggaggacatccaccctaccgtgcccaacccctacaacctgctgagcgggctgccccccagccaccagtggtacaccgtgctggacctgaaggatgcctttttctgtctgcggctgcatccaaccagccagccgctgtttgccttcgagtggagagatcccgagatgggcatcagcggccagctgacctggacccggctgccccagggcttcaagaacagccccaccctgttcaatgaggccctgcacagagacctggcagacttcaggatccagcaccctgacctgatcctgctgcagtacgtggacgacctgctgctggccgccacctctgagctcgactgtcagcagggcacccgggccctgctgcagactctgggcaatctgggctacagggccagcgccaagaaggcccagatctgccagaagcaggtgaagtacctgggctacctgctgaaggagggccagaggtggctgaccgaggcccggaaggagaccgtgatgggccagcccacccccaagacccccaggcagctgagggagttcttggggaaggccggcttctgcaggttgttcatccccggcttcgccgagatggccgcccctctgtaccccctgaccaagcctggcaccctgttcaactggggccccgaccagcagaaggcctaccaggagatcaagcaggccctgctgaccgccccagccctgggcctgcctgatctcaccaagcccttcgagctgttcgtggacgagaagcagggctatgccaagggggtgctgacccagaagctggggccatggaggcggccggtggcctacctgtccaagaagctggaccccgtggccgccggctggcctccatgcctgcggatggtggccgccatcgccgtgctgaccaaggacgccgggaagctgaccatgggtcagcccctggtgatcctggccccacacgccgtggaggccctggtcaagcagccacccgacaggtggctgagcaacgccaggatgacccactaccaggccctgctgctggacaccgacagggtgcagttcgggccagtggtggccctgaaccccgccaccctgctgcccctgcccgaggaggggctgcagcacaactgcctggacatcctggccgaggctcacggcaccaggcccgacctgacagaccagcccctgcccgacgccgaccacacctggtacaccgacggcagcagcctgctgcaggagggccagaggaaggccggcgccgccgtgaccaccgagaccgaggtgatctgggccaaggccctgcccgccggcaccagcgcccagcgggcagagctgattgccctcacccaggccctgaagatggccgagggcaagaagctgaacgtgtacactgacagcaggtacgcgttcgccaccgcccacatccacggcgagatctaccggcgcaggggctggctgaccagcgagggcaaggagatcaagaacaaggatgagatcctggccctgctgaaggccctgttcctgcccaagcggctgagcatcattcactgccctgggcaccagaagggccactctgctgaggccaggggcaatcggatggccgaccaggccgccaggaaggccgccatcaccgagacccctgacaccagcaccctgctgatcgagaactcctccccaagcggcggctccaagaggaccgccgacgggagcgagttcgagccaaagaagaagaggaaggtgtga

SEQ ID NO: 480 - RNA, 2196 nt, synthetic construct
  misc_feature 1..2196: note = Description of Artificial Sequence: Synthetic polynucleotide
  source 1..2196: mol_type = other RNA
agcggtggctcttcagggggatccagtggcagcgagacacccggcacctctgagtctgctacccccgagagctccggcgggagctccgggggtagcagcaccctgaacatcgaggacgagtacaggctgcacgagaccagcaaggagccggacgtgtctctgggcagcacctggctgtccgacttcccccaggcctgggccgagaccggcggcatggggctggccgtgcgccaggctccactgatcatccccctgaaggccaccagcacccctgtgtccatcaaacagtaccctatgtcccaggaggccaggctgggcatcaagccccacatccagcggctgctggaccaggggattctggtgccctgccagagcccctggaacaccccactgctgcctgtgaagaagcctggcaccaacgactataggcctgtgcaggacctgagggaggtgaacaagagggtggaggacatccaccctactgtgcctaacccttacaacctgctgtccggcctgccccccagccaccagtggtacacagtgctggacctgaaggacgccttcttctgcctgcggctgcaccccaccagccagcctctgttcgccttcgagtggagggacccagagatgggcatcagcggccagctgacctggaccaggctgccccagggcttcaagaacagccccacgctgttcaacgaggccctgcacagggacctggccgactttcggatccagcaccctgacctgatcctgctgcagtacgtggacgacctgctgctggccgccaccagcgagctggactgccagcagggcaccagagccctgctgcagaccctgggcaacctgggctacagggcctccgccaagaaggcccagatctgccagaagcaggtgaagtacctgggctacctgctgaaggagggacagaggtggctgaccgaggccaggaaggagaccgtgatggggcagcccacccccaagacccccaggcagctgcgggagttcctggggaaggccggcttctgccggctcttcattcctggcttcgccgagatggcagcccctctgtaccctctgaccaagcccgggaccctgttcaactgggggcccgaccagcagaaggcctaccaggagatcaagcaggccctgctgaccgccccagccctgggcctgcctgatctcaccaagcccttcgagctgttcgtggacgagaagcagggctacgccaagggcgtgctgacccagaagctgggcccttggcggaggcccgtggcctacctgagcaagaagctggaccccgtggcagccggctggcctccttgtctgcgcatggtggccgccatcgccgtgctgaccaaggacgccggcaagctgaccatgggccagcctctggtcatcctggccccacacgccgtggaggccctggtgaagcagccacctgacaggtggctgtccaacgccaggatgacccactaccaggccctgctgctggacaccgacagggtgcagttcggccccgtggtggccctgaaccccgccaccctgctgcccctccccgaggaggggctgcagcacaactgcctggacatcctggcagaggcccacggcacccggcctgacctgaccgaccagcccctgcccgacgccgaccacacctggtacaccgacggcagcagcctgctgcaggagggtcagaggaaggccggggccgccgtgaccaccgagaccgaggtgatctgggccaaggccctgcccgccgggacctccgcccagagggccgagctgatcgccctgacccaggccctgaagatggccgagggcaagaagctgaacgtgtacaccgacagccggtacgccttcgccaccgcccacatccacggcgagatctatcgccggagggggtggctgaccagcgagggcaaggagatcaagaacaaggatgagatcctggccctgctgaaggccctgttcctgcctaagaggctgagcatcatccactgccccggccatcagaagggccacagcgcagaggcaagggggaaccggatggccgaccaggccgcccggaaggccgccatcactgagacccccgacacctccactcttctgatcgagaactcctcccccagcggcggctccaagaggaccgccgacgggagcgagttcgagcccaagaagaagcggaaggtgtga

SEQ ID NO: 481 - RNA, 2196 nt, synthetic construct
  misc_feature 1..2196: note = Description of Artificial Sequence: Synthetic polynucleotide
  source 1..2196: mol_type = other RNA
tccggggggagcagcggggggagttccgggagcgagactcccgggactagcgagagcgccacccccgagagcagcgggggcagctctggaggctccagcaccctgaacatcgaggacgagtacaggctgcacgagacctccaaggagcccgacgtgagtctgggctccacctggctgtctgacttcccccaggcctgggccgagaccggcggcatgggcctggccgtcagacaggcccccctgatcatccccctgaaggccacctccacccccgtgtccatcaagcagtaccccatgtcccaggaggctcggctgggcatcaagccccacatccagcggctgctggatcaggggatcctggtgccctgccagagcccctggaacacccccctgctgcccgtgaagaagcccgggaccaacgactacaggcccgtgcaggacctgcgggaggtgaataagagggtggaggacatccaccctaccgtgcctaacccctacaacctgctgagcgggctgccccccagccaccagtggtacaccgtgctggacctgaaggacgcctttttctgtctgaggctgcaccccaccagccagcctctgttcgccttcgagtggcgggatcccgagatggggatcagcgggcagctgacctggacccggctgccccagggcttcaagaacagccccaccctgttcaatgaggccctgcacagagacctggcggacttcaggatccagcacccagatctgattctgctgcagtacgtggacgacctgctgctggccgccacctctgagctggactgccagcagggcaccagagccctgctgcagaccctggggaatctgggctatcgggccagcgccaagaaggcccagatttgccagaagcaggtgaagtacctgggctacctgctgaaggagggccagaggtggctgaccgaggccaggaaggagaccgtgatgggccagcctaccccaaagacccctcggcagctgagggagtttctggggaaggctggcttctgccggctcttcattcctggcttcgccgagatggccgccccactgtaccccctgaccaagccagggaccctgttcaactggggccccgaccagcagaaggcctaccaggagatcaagcaggccctgctgaccgccccagccctgggcctgcctgatctgaccaagcccttcgagctgttcgtggacgagaagcagggctacgccaagggcgtgctgacccagaagctgggcccatggcggcggccagtggcctacctgtccaagaagctggaccccgtggccgctggctggccaccatgcctgcgcatggtggccgccatcgccgtgctgaccaaggacgccggcaagctgaccatgggccagcctctggtgatcctggccccacacgccgtggaggccctggtgaagcagccacctgacaggtggctgtccaacgccaggatgacccactatcaggccctgctgctcgacaccgacagggtgcagttcggccccgtggtggccctgaaccccgccaccctgctgcccctgcctgaggaggggctgcagcacaactgcctggacatcctggcagaggcccacggcaccaggccggacctgaccgatcagcccctgcctgatgccgaccacacctggtacaccgacggcagctccctcctgcaggaggggcagcggaaggccggggccgccgtgaccaccgagaccgaggtgatctgggccaaggccctgcccgcagggacctccgcccagagggccgagctgatcgccctgacccaggccctgaagatggccgagggcaagaagctgaacgtgtacaccgacagccggtacgcgttcgccaccgcccacatccacggcgagatctacaggcgcaggggctggctgaccagcgagggcaaggagatcaagaacaaggatgagatcctggccctgctgaaggccctgttcctgcccaagcgcctgtccatcatccactgccccggccatcagaagggccactctgctgaggctcgggggaatcggatggccgaccaggccgccagaaaggccgccatcaccgagacccccgacaccagcaccctgctgatcgagaacagcagcccctccgggggcagcaagaggaccgctgacggcagcgagttcgagcccaagaagaagcggaaggtgtga

SEQ ID NO: 482 - RNA, 2196 nt, synthetic construct
  misc_feature 1..2196: note = Description of Artificial Sequence: Synthetic polynucleotide
  source 1..2196: mol_type = other RNA
agcggggggtcctcagggggcagctcaggctctgagacccccggcaccagcgagagtgctaccccagagagcagcgggggctcctctggaggctccagcaccctgaacatcgaggacgagtacaggctgcacgagacctccaaggagcccgacgtgtctctggggagcacctggctgtccgacttccctcaggcctgggctgagaccggaggcatgggcctggccgtgcgccaggcccctctgatcatccccctgaaggccaccagcacccccgtgagcatcaagcagtaccctatgagccaggaggccaggctgggcatcaagccccacatccagcggctgctggaccagggcatcctggtgccctgccagagcccctggaacaccccactgctgccagtgaagaagcctggcaccaacgactacaggccggtgcaggacctgagggaggtgaacaagagggtggaggacatccaccctactgttcccaatccctacaacctgctgtccggcctgcctcctagccatcagtggtacaccgtgctggacctgaaggatgccttcttctgcctgcggctgcaccccaccagccagcctctgttcgccttcgaatggagggacccagagatgggcatcagcgggcagctgacctggacccggctgccccagggcttcaagaacagccccaccctgttcaatgaggccctgcaccgggacctggccgacttcaggatccagcacccagatctgatcctgctgcagtacgtggacgacctgctgctggccgccaccagcgagctggactgccagcagggcaccagagccctgctgcagaccctggggaatctgggctatcgggccagcgccaagaaggcccagatttgccagaagcaggtgaagtatctggggtacctgctgaaggaggggcagcggtggctgaccgaggcacggaaggagaccgtgatgggccagcccacccccaagacccccaggcagctgcgggagttcctggggaaggccggcttctgccggctgttcatccccggcttcgccgagatggctgcccctctgtacccactgaccaagccggggaccctgttcaactggggccccgaccagcagaaggcctatcaggagatcaagcaggccctgctgaccgccccagccctgggcctgcctgacctgaccaagcccttcgagctgttcgtggacgagaagcagggctacgccaagggcgtgctgacccagaagctgggcccttggcggcggccagtggcctacctgtccaagaagctggaccccgtggccgctggctggcctccatgcctgcggatggtggccgccatcgccgtgctgaccaaggacgctggcaagctgaccatgggccagcccctggtgatcctggccccacacgccgtggaggccctggtgaagcagccacccgacaggtggctgtccaacgccaggatgacccactaccaggccctgctgctcgacaccgacagggtgcagttcggcccagtggtggccctgaaccccgccaccctgctgcccctgcccgaggagggcctgcagcacaactgcctggacatcctggccgaggcccacggcaccaggcccgacctgaccgaccagcctctgccagatgccgaccacacctggtacaccgacggcagcagcctgctgcaggaggggcagcggaaggcaggcgccgccgtgaccaccgagaccgaggtgatctgggccaaggccctgcctgctgggaccagcgcccagcgggccgagctgatcgccctgacccaggccctgaagatggccgagggcaagaagctgaacgtgtacaccgacagccggtacgcgttcgccaccgcccacatccacggcgagatctacaggcgcaggggctggctgaccagcgagggcaaggagatcaagaacaaggatgagatccttgccctgctgaaggccctgttcctgcccaagcgcctgtccatcatccactgccccggccatcagaagggccacagcgcagaggcaagggggaaccggatggccgaccaggccgcccggaaggccgccatcactgagacccccgacacctccaccctgctgatcgagaacagcagccccagcggcgggagcaagcgcaccgccgacggctccgagttcgagcccaagaagaagaggaaggtgtga

SEQ ID NO: 483 - RNA, 2196 nt, synthetic construct
  misc_feature 1..2196: note = Description of Artificial Sequence: Synthetic polynucleotide
  source 1..2196: mol_type = other RNA
tccggggggagcagcgggggcagctccggcagcgagacccccggaacctctgagagcgccactccagagagttccggcgggtccagcggcgggagcagcaccctgaacatcgaggacgagtacaggctgcacgagaccagcaaggagcccgacgtgagtctgggctccacctggctgtctgacttcccccaggcctgggccgagaccggcggcatgggcctggccgtcaggcaggcccccctgatcatccccctgaaggccaccagcaccccagtgtccatcaagcagtaccctatgtcacaggaggccaggctgggcatcaagccccacatccagagactgctggaccagggcatcctggtgccctgccagagtccctggaacacccccctgctgcccgtgaagaagcctggcaccaatgactataggcctgtgcaggacctgcgggaggtgaacaagagggtggaggacatccaccctactgtgcctaacccctacaacctgctgagtggcctgccccccagccaccagtggtacaccgtgctggacctgaaggacgcctttttctgtctgcggctgcaccccacctctcagcctctcttcgccttcgagtggagagaccctgagatggggatcagcgggcagctgacctggacccggctgccccagggcttcaagaacagccccaccctgttcaatgaggccctgcacagagacctggccgacttcaggatccagcaccccgacctgatcctgctgcagtacgtggacgacctgctgctggccgccactagtgagctggactgccagcagggcaccagggccctgctgcagaccctgggcaacctggggtacagggcctctgccaagaaggcccagatctgccagaagcaggtcaagtacctgggctacctgctgaaggagggtcagcggtggctgaccgaggcccgcaaggagaccgtgatgggccagcccacccccaagacccccaggcagctcagggagtttctgggcaaggccggcttctgccggctgttcatccccggcttcgccgagatggcagcccccctgtaccccctgaccaagcctgggaccctgttcaactggggcccagaccagcagaaggcctatcaggagatcaagcaggccctgctgaccgccccagccctgggcctgcctgacctgaccaagcccttcgagctgttcgtggacgagaagcaggggtacgccaagggggtgctgacccagaagctgggcccctggcgcaggccagtggcctacctgtccaagaagctggacccagtggcagcagggtggccaccatgcctgcgcatggtggccgccatcgccgtgctgaccaaggacgccgggaagctgaccatggggcagcccctggtgatcctggccccacacgccgtggaggccctggtgaagcagccgcctgataggtggctgtccaacgccaggatgacccactatcaggccctgctgctggacaccgacagggtgcagttcggccccgtggtggccctgaaccccgccaccctgctgccactgcctgaggaggggctgcagcacaactgcctggacattctggccgaggcccacggcactcggccagatctgaccgatcagcctctgcccgatgccgaccacacctggtataccgacggcagcagcctgctgcaggaggggcagaggaaggccggcgccgccgtgaccaccgagaccgaggtgatctgggccaaggccctgcccgccggcacctctgcccagcgggcagagctgatcgccctgactcaggccctgaagatggccgagggcaagaagctgaatgtgtacaccgacagccgctacgccttcgccaccgcccacatccacggcgagatctacaggcggcggggatggctgaccagcgagggcaaggagatcaagaacaaggacgagatcctggccctgctgaaggccctgttcctgcccaagcggctgtccatcattcattgccccggccatcagaagggccactccgctgaggccagggggaacaggatggccgaccaggccgcccgcaaggccgccatcaccgagacccccgataccagcaccctgctgatcgagaactcctctcccagcggcggctccaagaggaccgccgatgggagcgagttcgagcccaagaagaagcggaaggtgtga

SEQ ID NO: 484 - RNA, 2196 nt, synthetic construct
  misc_feature 1..2196: note = Description of Artificial Sequence: Synthetic polynucleotide
  source 1..2196: mol_type = other RNA
agcggcggctcatctggcggcagcagcggctccgagacccctggcaccagcgagagcgccacccccgagagcagcggcggcagctccgggggctctagcaccctgaacatcgaggacgagtaccggctgcacgagaccagcaaggagcctgacgtgagcctgggcagcacctggctgtccgactttcctcaggcctgggccgaaaccggcggcatgggcctggccgtgcggcaggccccactgatcatccctctgaaggccaccagcacccccgtgagcatcaagcagtaccccatgagccaggaggccaggctgggcatcaagccccacatccagaggctgctggatcagggaatcctggtgccttgtcagagcccttggaacacccctctgctgcctgtgaagaaaccaggaaccaacgactacagaccagtgcaggacctgagggaggtgaataagagagtggaggacatccaccccaccgtgcccaacccctacaacctgctgtcaggcctgcccccctcccaccagtggtacaccgtgctggacctgaaggacgcctttttctgcctgagactgcaccccactagccagcccctgttcgccttcgagtggagggacccagagatgggcatcagcggccagctgacctggacaagactgccacagggcttcaagaacagccctaccctgttcaacgaggccctgcaccgggacctggccgacttcagaatccagcaccccgacctgatcctgctgcagtacgtggacgacctgctgctggccgccaccagcgagctggactgccagcagggcaccagagccctgctgcagaccctgggcaacctgggctacagggccagcgccaagaaggcccagatctgccagaagcaggtgaagtacctgggctatctgctgaaggagggccagaggtggctgaccgaggccaggaaggagaccgtgatgggccagcctacccctaagaccccccggcagctgcgggagttcctgggcaaggccggcttctgccggctgttcatccccggcttcgccgagatggccgccccactgtatccactgaccaagcccggcaccctgtttaattggggccccgaccagcagaaggcctaccaggagatcaagcaggccctgctgaccgcccctgccctgggcctgcccgacctgaccaagcccttcgagctgttcgtggacgagaagcagggctacgccaagggcgtgctgacccagaagctgggcccctggcggcggcccgtggcctacctgagcaagaagctggacccagtggccgccggctggcctccatgcctgagaatggtggccgccatcgccgtgctgaccaaggatgccggcaagctgaccatgggccagcctctggtgatcctggccccccacgccgtggaggccctggtgaagcagccacccgataggtggctgtctaacgccaggatgacccattaccaggccctgctgctggacaccgacagagtgcagttcggccccgtggtggccctgaatcccgccacactgctgcccctgcccgaggagggcctgcagcacaactgcctggacatcctggccgaggcccacggcacccggcccgacctgacagaccagccactgcccgacgccgaccacacctggtacaccgacggcagctccctgctgcaggagggccagcgcaaggccggcgccgccgtgaccaccgagaccgaggtgatctgggccaaggccctgcccgccggcacctccgctcagagggccgagctgatcgccctgacccaggccctgaagatggccgagggcaagaagctgaacgtgtacaccgacagcagatacgccttcgccaccgcccacatccacggcgagatctacagaaggagaggctggctgacctccgaaggcaaagagatcaagaacaaggacgagatcctggccctgctgaaggccctgttcctgcctaagcggctgtctatcatccactgtcctggccaccagaagggccactccgccgaggcccggggcaacaggatggccgaccaggccgccaggaaggccgctattaccgagacccctgacacctccaccctgctgatcgagaactccagccccagcggcggctccaagaggaccgccgatggctccgagttcgagcccaagaagaagaggaaagtctaa

SEQ ID NO: 485 - RNA, 2196 nt, synthetic construct
  misc_feature 1..2196: note = Description of Artificial Sequence: Synthetic polynucleotide
  source 1..2196: mol_type = other RNA
tccgggggaagcagcggcggcagcagcggctcagagacccccggcacatccgagagcgccacccccgagagcagcggcggcagctccggcggcagcagcaccctgaatatcgaggacgagtacagactgcacgagacaagcaaggaacccgacgtgtctctgggcagcacctggctgtccgacttcccccaggcctgggccgagaccggcggcatgggcctggccgtgcggcaggcccccctgatcatccccctgaaggccaccagcacccccgtgtccatcaaacagtaccctatgtcccaggaggccagactgggcatcaagccccacatccagcggctgctggaccagggcatcctggtgccctgccagagcccttggaacacccctctgctgcccgtgaagaagcctggcaccaacgactacaggcccgtgcaggacctgcgggaggtgaacaagagagtggaggacatccaccccaccgtgcccaacccctacaacctgctgagcggcctgcctccaagccaccagtggtacacagtgctggacctgaaagacgctttcttctgcctgaggctgcacccaacaagccagcccctgttcgccttcgagtggagggaccccgagatgggcatcagcggccagctgacctggacccggctgcctcagggcttcaagaactcccccaccctgtttaacgaggccctgcacagggacctggccgacttccgcatccagcatcccgacctgatcctgctgcagtacgtggacgacctgctgctggccgccaccagcgagctggactgtcagcagggcaccagagccctgctgcagaccctgggcaacctgggctacagggcctccgccaagaaggcccagatctgccagaagcaggtgaagtacctgggctacctgctgaaggagggccagcgctggctgaccgaggccagaaaggagaccgtgatgggccagcctaccccaaagacccccagacagctgcgcgagttcctgggcaaggccggcttctgtcggctgttcatccccggcttcgccgagatggccgcccccctgtacccactgaccaaacccggcaccctgttcaactggggccccgatcagcagaaggcctaccaggagatcaagcaggccctgctgaccgcccccgcactgggcctgccagacctgaccaagccctttgagctgttcgtggacgagaagcagggctacgccaagggcgtgctgacccagaagctgggcccttggcggaggcccgtggcctacctgagcaagaagctggaccccgtggccgccggctggcccccctgcctgcggatggtggccgccatcgccgtgctgaccaaggacgccggcaagctgaccatgggccagcctctggtgatcctggcccctcacgccgtggaggccctggtgaagcagcccccagacaggtggctgtctaatgccaggatgacacactaccaggccctgctgctggataccgacagggtgcagttcggccccgtggtggccctgaacccagccaccctgctgcctctgcccgaggaggggctgcagcacaactgtctggacatcctggccgaagcccacggcaccagacctgacctgaccgaccagccactgcctgacgccgaccacacctggtacaccgacggctccagcctgctgcaggagggccagagaaaggccggggccgccgtgacaaccgagaccgaggtgatctgggccaaggccctgcccgccggcacctccgcccagagagccgagctcatcgccctgacccaggccctgaagatggccgagggcaagaagctgaatgtgtacaccgacagcaggtacgccttcgccaccgcccacatccacggcgagatctacaggaggaggggctggctgacaagcgagggcaaggagatcaagaacaaggatgagatcctggccctgctgaaggccctgttcctgcccaagcggctgtccatcatccactgccctggccaccagaaggggcatagcgccgaggcccgcggcaaccgcatggccgaccaggccgccaggaaggcagccatcacagagaccccagacaccagcaccctgctgatcgagaacagcagcccctctggcggctccaagaggaccgccgacggcagcgagttcgagcccaagaagaagaggaaagtctaa

SEQ ID NO: 486 - RNA, 2196 nt, synthetic construct
  misc_feature 1..2196: note = Description of Artificial Sequence: Synthetic polynucleotide
  source 1..2196: mol_type = other RNA
agcggcggcagctccggcggcagctccggctccgagacccccggcaccagcgagagcgccacccccgagagctctggcggctccagcggcggcagcagcaccctgaacatcgaggacgagtacaggctgcacgagaccagcaaggagccagacgtgtccctgggctcaacctggctgtccgacttcccacaggcctgggccgagaccggcgggatgggcctggccgtgcgccaggcccctctgatcatccctctgaaagccacatctacccctgtgtccatcaagcagtacccaatgtcacaggaggcccggctgggcatcaagccacacatccagcggctgctggaccagggcatcctggtgccctgccagagcccctggaacacccctctgctgcccgtgaagaaacctggcaccaacgactacagacccgtgcaggacctgcgcgaggtgaataagagggtggaggacatccacccaaccgtgcccaacccctacaacctgctgtccggcctgccaccaagccaccagtggtataccgtgctggacctgaaggacgccttcttttgcctgaggctgcaccctacctctcagcctctgttcgccttcgagtggcgggacccagagatgggcatcagcggccagctgacatggacccggctgccacagggcttcaagaacagcccaaccctgttcaacgaggccctgcacagggacctggccgacttccggatccagcaccccgacctgatcctgctgcagtacgtggacgacctgctgctggccgccaccagcgagctggactgccagcagggcacccgcgccctgctgcagaccctgggcaacctgggctaccgggccagcgccaagaaggcccagatctgtcagaagcaggtgaagtacctgggctacctgctgaaggagggccagaggtggctgaccgaggccaggaaggagaccgtgatgggccagcctaccccaaagacccccaggcagctgcgggagttcctggggaaggccggcttttgcaggctgttcatcccaggctttgccgagatggccgcccctctgtaccccctgactaagcctggcaccctgttcaactggggccccgatcagcagaaggcctaccaggagatcaagcaggccctgctgaccgcccctgccctgggcctgcccgacctgaccaagcccttcgagctgttcgtggatgaaaagcagggctacgccaagggcgtgctgacccagaagctgggcccctggaggagacctgtggcctacctgtccaaaaagctggaccccgtggccgccggctggcccccctgcctgcggatggtggccgccatcgccgtgctgaccaaggacgccggcaagctgaccatgggccagcctctggtgattctggccccccacgccgtggaggccctggtgaagcagccccccgacagatggctgtccaacgccagaatgacccactaccaggccctgctgctggacaccgaccgcgtgcagttcggccccgtggtggccctgaaccccgccaccctgctgcccctgcccgaggaaggcctgcagcacaactgcctggacatcctggccgaggcccacggcaccaggccagacctgaccgaccagcccctgcccgacgccgaccacacctggtacaccgatgggtccagcctgctgcaggagggccagaggaaggccggcgccgccgtgaccacagagaccgaggtgatctgggccaaggccctgccagccggcaccagcgcccagagggccgagctgatcgccctgacccaggccctgaagatggccgagggcaagaagctgaatgtgtacaccgacagcagatacgccttcgccaccgcccacatccacggcgagatctacaggagaaggggctggctgactagcgagggcaaggagattaagaacaaagacgagatcctggccctgctgaaggccctgttcctgcccaagaggctgtctattatccattgcccaggccaccagaagggccactccgccgaagccaggggcaacagaatggccgaccaggccgccaggaaagccgccatcaccgagacccccgacacctctaccctgctgatcgagaacagctcccccagcggcggcagcaagaggaccgccgacggctccgagttcgagcccaagaagaagaggaaagtctaa

SEQ ID NO: 487 - RNA, 2196 nt, synthetic construct
  misc_feature 1..2196: note = Description of Artificial Sequence: Synthetic polynucleotide
  source 1..2196: mol_type = other RNA
agcggcggctcctccggcggcagcagcgggtccgagacccccggcaccagcgagagcgccacccccgagagctccggcggcagttccggcggctccagcaccctgaacatcgaggacgagtacaggctgcacgagaccagcaaggagcccgacgtgtccctgggcagtacctggctgagcgactttccccaggcctgggccgagacaggcggcatgggcctggccgtgcggcaggcccccctgatcatcccactgaaagccaccagcaccccagtgtccatcaagcagtatcctatgtcccaggaggcccgcctgggcatcaagcctcacatccagaggctgctggatcagggcatcctggtgccttgccagtcaccctggaacacccccctgctgcccgtgaagaagcctggcaccaacgattacagaccagtgcaggacctgcgggaggtgaacaagagggtggaggatatccaccccaccgtgcccaacccctacaacctgctgtccggcctgcccccctcccaccagtggtacactgtgctggacctgaaggacgccttcttttgcctgcggctgcaccccacctctcagcccctgttcgccttcgagtggagagatcccgagatgggcatcagcggccagctgacctggaccaggctgccccagggcttcaagaacagccccaccctgttcaacgaggccctgcaccgggacctggccgacttccgcatccagcaccccgacctgatcctgctgcagtacgtggacgacctgctgctggccgccaccagcgagctggattgccagcagggcaccagggccctgctgcagaccctgggcaacctgggctaccgggccagcgccaagaaggcccagatttgccagaagcaggtgaagtacctgggctacctgctgaaggagggccagcgctggctgaccgaggcccggaaggagaccgtgatgggccagcccacccccaagacccccagacagctgagggagtttctgggcaaggccggcttctgtagactgttcatccccggcttcgccgagatggccgcccccctgtaccctctgaccaagcccggcacactgttcaactggggcccagaccagcagaaggcctaccaggagattaagcaggccctgctgactgccccagccctgggcctgcccgacctgaccaagccttttgagctgttcgtggacgagaagcagggctacgccaagggcgtgctgacccagaagctggggccttggcggcgccccgtggcctacctgtccaagaagctggaccccgtggccgccggatggcccccctgcctgagaatggtggccgccatcgccgtgctgaccaaggacgccgggaagctgaccatgggccagcccctggtgatcctggccccccacgccgtggaggccctggtgaagcagccccccgacagatggctgagcaacgcccgcatgacccactaccaggccctgctgctggacaccgacagggtgcagttcggccctgtggtggctctcaaccccgccaccctgctgcctctgcccgaggagggcctgcagcacaactgcctggacattctggccgaggcccacggcaccagacccgacctgaccgaccagcccctgcctgacgccgaccacacctggtacaccgacggctccagcctgctgcaggagggccagaggaaggccggcgccgccgtgaccaccgagaccgaggtgatctgggccaaggccctgcccgccggcaccagcgcccagagagccgaactgatcgccctgacccaggccctgaagatggccgagggcaagaagctgaacgtgtataccgacagcaggtacgccttcgccacagcccacatccacggcgagatctacaggaggaggggctggctgacctccgagggcaaggagatcaaaaacaaggacgagatcctggccctgctgaaggccctgttcctgccaaaaagactgtctatcatccactgccctggccaccagaagggccacagcgccgaggccaggggcaacagaatggccgaccaggccgccagaaaggccgccatcaccgagacccccgacaccagcaccctcctgatcgagaacagctctccaagcggaggcagcaagagaacagccgatggcagcgagttcgagcccaagaagaagaggaaagtctaa

SEQ ID NO: 488 - RNA, 2196 nt, synthetic construct
  misc_feature 1..2196: note = Description of Artificial Sequence: Synthetic polynucleotide
  source 1..2196: mol_type = other RNA
agcgggggctctagcggcggcagcagcgggtctgagacccctgggaccagcgagtccgccacccccgagtcctctggcggcagctccggcggctccagcaccctgaatatcgaggacgagtacagactgcacgagaccagcaaggagcccgatgtgagcctggggtccacctggctgtctgacttccctcaggcctgggccgagaccggcggcatgggcctggccgtgcgccaggcccccctgatcatccctctgaaggccaccagcacacccgtgagcatcaagcagtaccccatgtcccaggaggccagactgggcatcaagcctcacatccagcgcctgctggaccagggcatcctggtgccctgccagtccccatggaacaccccactgctgcccgtgaagaagcccggcacaaacgattacagacccgtgcaggacctgcgcgaggtgaacaagcgggtggaggacatccaccccaccgtgcccaacccctacaacctgctgtctggcctgccaccctcccaccagtggtacaccgtgctggatctgaaggacgccttcttctgcctgcggctgcaccctaccagccagcccctgttcgcctttgagtggcgggatcccgagatgggcatctccggccagctgacctggacccggctgccccagggcttcaagaacagccccaccctgtttaacgaggccctgcacagagacctggccgacttcagaatccagcaccctgatctgatcctgctgcagtacgtggacgacctgctgctggccgccaccagcgagctggattgccagcagggcacccgggccctgctgcagaccctgggcaacctgggctacagagccagcgccaagaaggcccagatctgccagaagcaggtgaagtacctgggctacctgctgaaggagggccagaggtggctgaccgaggccagaaaggagaccgtgatgggccagcccacccccaagacccctaggcagctgcgggagttcctgggcaaggccgggttctgcagactgttcattcccggctttgccgagatggccgcccccctgtaccccctgaccaagcccggcaccctgttcaactggggccccgatcagcagaaggcctaccaggagatcaagcaggccctgctgaccgcccccgccctgggcctgcccgacctgaccaagcccttcgagctgttcgtggacgagaagcagggctacgccaagggcgtgctgacccagaagctgggcccctggagaaggcctgtggcctacctgagcaagaagctggatcctgtggccgccggctggcctccttgcctgcgcatggtggccgccatcgccgtgctgaccaaggacgccggcaagctgacaatgggccagcccctggtgattctggccccccacgccgtggaggccctggtgaagcagccccccgacagatggctgtccaacgcccgcatgacccactaccaggccctgctgctggacaccgaccgggtgcagttcggccccgtggtggccctgaacccagccaccctgctgcccctgcccgaggagggcctgcagcacaattgcctggacatcctcgccgaggcccatggcaccaggccagacctgaccgaccagcccctgcctgacgccgaccacacctggtacaccgacggcagctctctgctgcaggagggccagaggaaggctggcgccgccgtgaccaccgagaccgaggtgatctgggccaaggccctgccagccggcaccagcgcccagagagccgagctgatcgccctgacccaggccctgaagatggccgagggcaagaagctgaacgtgtacaccgacagccggtacgccttcgccaccgcccacatccacggcgagatctacagaaggagaggctggctgacctctgagggcaaggagatcaagaataaggacgagatcctggccctgctgaaggccctgttcctgcccaagcgcctgtccatcatccactgtccaggccaccagaagggccatagcgccgaggccagaggcaacagaatggccgaccaggccgccagaaaggccgccatcaccgagacccctgacaccagcaccctgctgatcgagaattccagcccctccggcggctccaagaggaccgccgacggcagcgagttcgagcccaagaagaagaggaaagtctaa

SEQ ID NO: 489 - RNA, 2196 nt, synthetic construct
  misc_feature 1..2196: note = Description of Artificial Sequence: Synthetic polynucleotide
  source 1..2196: mol_type = other RNA
agcggcggctccagcggcggctccagcggatccgagacccccggcaccagcgagtccgccacccccgagagcagcgggggcagcagcggcggcagctccaccctgaacatcgaggacgagtacaggctgcacgagaccagcaaggagcccgacgtgtctctgggcagcacctggctgtccgacttcccccaggcctgggccgagaccggcggcatgggcctggccgtgagacaggcccccctgatcatccctctgaaggccaccagcacccccgtgtctatcaagcagtaccccatgtctcaggaggccagactgggcatcaagccccatatccagcggctgctggaccagggcatcctggtgccctgccagagcccatggaacacccccctgctgcccgtgaagaagcccggcaccaacgattaccggcccgtgcaggatctgcgcgaggtgaataagagagtggaggacatccaccctacagtgcccaatccttacaacctgctgagcggcctgccccccagccaccagtggtacaccgtgctggacctgaaggacgccttcttctgcctgaggctgcaccctaccagccagccactgtttgccttcgaatggagggaccccgagatgggcatcagcggccagctgacctggaccaggctgccccagggcttcaagaacagccctactctgttcaacgaggccctgcacagggacctggccgactttagaatccagcacccagacctgatcctcctgcagtacgtggacgacctgctgctggccgccaccagcgagctggactgtcagcagggcaccagggccctgctgcagaccctgggcaatctgggctacagggcctccgccaagaaggcccagatctgccagaagcaggtgaagtacctgggctacctgctgaaggagggccagcggtggctgaccgaggcccgcaaggagaccgtgatgggccagcccacccccaagacccccaggcagctgcgggagttcctgggcaaggccggcttctgccggctgttcatccctggcttcgccgagatggccgctcccctgtaccctctgaccaagcctggcaccctgttcaattggggccccgaccagcagaaggcctaccaggagatcaagcaggccctgctgacagccccagccctgggcctgcccgacctgaccaagccattcgagctgttcgtggacgagaagcagggctacgccaagggcgtgctgacccagaagctgggcccctggagacggcctgtggcctacctgtccaagaagctggaccccgtggccgccggctggcccccctgcctgcggatggtggccgccattgccgtgctgaccaaagatgccgggaagctgaccatgggccagcccctggtgatcctggcccctcatgccgtggaggccctggtcaagcagcctcccgatagatggctgtccaacgcccggatgacccactaccaggccctgctgctggacaccgatcgcgtgcagttcggccccgtggtggccctgaaccccgccaccctgctgcccctgccagaggagggcctgcagcacaactgcctggacatcctggccgaggcccacggcaccaggcccgacctgaccgaccagcccctgcccgacgccgatcacacttggtacacagacggcagctctctgctgcaggagggacagagaaaggccggcgccgccgtgaccaccgagaccgaggtgatctgggccaaggccctgcccgccggcaccagcgcccagagggccgagctgatcgccctgacccaggccctgaagatggccgagggcaagaagctgaacgtgtacaccgacagcagatacgccttcgccacagcccatatccacggagaaatctacaggcggaggggctggctgaccagcgagggcaaggagatcaagaacaaggacgagatcctggccttgctgaaggccctgttcctgcccaagcgcctgtccatcatccactgccccggccaccagaagggccactccgccgaggccaggggcaaccggatggccgaccaggccgccagaaaggccgccatcaccgagacccccgacacctccaccctgctgatcgagaacagcagccctagcggcggctccaagcgcacagccgacggctccgagttcgagcccaagaagaagaggaaagtctaa

SEQ ID NO: 490 - RNA, 2196 nt, synthetic construct
  misc_feature 1..2196: note = Description of Artificial Sequence: Synthetic polynucleotide
  source 1..2196: mol_type = other RNA
tccggcggctcttccggcggcagcagcggcagcgagaccccaggcactagcgagagcgccaccccagagagctccggcggcagcagcggcggctcctctaccctgaacatcgaggacgagtacagactgcacgagaccagcaaggagcctgacgtgagcctgggcagcacctggctgtccgacttccctcaggcctgggccgagaccggcgggatgggcctggccgtgcggcaggcccccctgatcatccccctgaaggccacctccacccccgtgtccatcaagcagtaccccatgagccaggaggccaggctggggatcaagcctcacattcagagactgctggaccagggcatcctggtgccttgtcagagcccctggaacactcccctgctgccagtcaagaagcccggcaccaacgactacagacccgtgcaggatctgcgggaggtgaataagagggtggaggacatccacccaaccgtgcccaacccctacaacctgctgtccggcctgcctcccagccaccagtggtacaccgtgctggatctgaaggacgccttcttctgcctgcggctgcaccccacctcccagcccctgttcgccttcgagtggcgagaccccgaaatgggcatctccggccagctgacctggaccaggctgccccagggcttcaagaacagccccaccctgtttaacgaggccctgcaccgggatctggccgacttcagaatccagcaccctgacctgatcctgctgcagtatgtggacgacctgctgctggccgccacctccgagctggactgccagcagggcaccagggccctgctgcagaccctgggcaatctgggctaccgggccagcgccaagaaggcccagatctgccagaagcaggtgaagtacctgggctacctgctgaaggagggacagcggtggctgaccgaggcccggaaggagaccgtgatgggccagcctacccccaagacccccaggcagctgcgggagttcctgggcaaggccggcttctgcaggctgttcatccccggcttcgccgagatggccgcccccctgtacccactgacaaagcccggcaccctgttcaactggggccccgaccagcagaaggcctaccaggagatcaagcaggccctgctgaccgcccccgccctgggcctgcccgacctgaccaaaccattcgagctgttcgtggacgagaagcagggctacgctaagggcgtgctgacccagaagctgggcccatggagacggcctgtggcctacctgagcaagaagctggaccctgtggccgccggctggcctccatgcctgcgcatggtggccgccatcgccgtgctgacgaaggacgccggcaagctgaccatgggccagcccctggtgatcctggcccctcacgccgtggaggctctggtgaagcagccccccgaccggtggctgtccaacgccaggatgacccactaccaggccctgctgctggacaccgacagggtgcagttcggccccgtggtggccctgaaccccgccaccctgctgcctctgcccgaggagggcctgcagcacaactgtctggatatcctggccgaggctcacggcaccaggccagacctgaccgaccagcccctgcccgacgccgaccacacctggtacaccgacgggagctccctgctgcaggagggccagcgcaaggccggagccgccgtgaccaccgagacagaggtgatttgggccaaggccctgcccgccggcaccagcgcccagagggccgagctgatcgccctgacccaggccctgaagatggccgagggaaagaagctgaacgtgtacaccgacagcagatacgccttcgccaccgcccacatccacggggagatctacaggaggcggggctggctgaccagcgagggcaaggagatcaagaacaaggacgagatcctggccctgctgaaggccctgttcctgcccaagaggctgtctatcatccactgtcctggccaccagaagggccacagcgccgaggccagaggcaacaggatggccgaccaggccgccaggaaggccgccatcaccgagacccccgacaccagcaccctgctgatcgagaacagcagccccagcggcggcagcaagaggaccgccgacggcagcgagttcgagcccaagaagaagaggaaagtctaa

SEQ ID NO: 491 - RNA, 2196 nt, synthetic construct
  misc_feature 1..2196: note = Description of Artificial Sequence: Synthetic polynucleotide
  source 1..2196: mol_type = other RNA
tccggaggcagcagcggcggcagcagcggcagcgagaccccaggcaccagcgagagcgccaccccagagtccagcggaggctctagcggcggcagctccaccctgaacatcgaggacgagtacagactgcacgagacttccaaggagcccgatgtgtccctgggcagcacctggctgagcgattttcctcaggcctgggccgagaccggcgggatggggctggccgtgcgccaggcccccctgatcatcccactgaaggccaccagcacccccgtgagcatcaagcagtacccaatgtctcaggaggcccgcctgggcatcaagccccacatccagagactgctggaccagggcatcctggtgccctgccagagcccctggaacacccccctgctgcccgtgaagaagcctggcaccaacgactacaggccagtgcaggacctgcgcgaggtgaacaagagggtggaggacatccaccccaccgtgcccaatccatacaacctgctgagcggcctgccccccagccaccagtggtacaccgtgctggacctgaaggacgccttcttctgcctgaggctgcaccccacctcccagcctctgttcgccttcgagtggagggatcccgagatgggcatctccggccagctgacctggacccggctgccccagggcttcaagaactctcctaccctgttcaacgaggccctgcatcgggacctggccgacttcaggatccagcaccccgacctgatcctgctgcagtacgtggacgatctgctgctggccgccacctccgagctggactgccagcagggcaccagggccctgctgcagaccctgggcaacctggggtatcgcgccagcgccaagaaggctcagatctgccagaagcaggtgaaatacctgggctacctgctgaaggagggccagcgctggctgacagaggccagaaaggagaccgtgatgggccagcccaccccaaagacccccagacagctgagagagttcctgggcaaggccggcttctgcaggctgttcatccccggcttcgccgagatggccgcccccctgtaccccctgaccaagccagggaccctgttcaactggggccccgaccagcagaaggcctaccaggagatcaagcaggccctgctgaccgcccccgccctgggcctgcccgacctgaccaagcccttcgagctgttcgtggacgagaagcagggctacgccaagggcgtgctcacccagaagctgggcccttggagaaggccagtggcctacctgtccaagaaactggacccagtggccgccggctggcccccctgcctgagaatggtggccgccatcgccgtgctgaccaaggacgccggcaaactgaccatgggccagcccctggtgattctggccccccacgccgtggaggccctggtgaagcagccccccgatcggtggctgagcaacgccagaatgacccactaccaggccctgctgctggacaccgatagagtgcagttcggcccagtggtggccctgaaccccgccaccctgctgcccctgcccgaggagggcctgcagcacaactgcctggatatcctggccgaggcccacggcacccggcccgacctgaccgaccagcccctgcccgacgccgaccacacctggtacacagacggcagcagcctgctgcaggaggggcagagaaaggccggcgccgccgtgaccaccgagaccgaggtgatctgggccaaggccctgcccgccggcaccagcgcccagagagccgagctgattgccctgacccaggccctgaagatggccgagggcaagaagctgaatgtgtataccgacagcagatacgccttcgccaccgcccacatccacggcgagatctacagacggaggggctggctgacctctgaaggcaaggagatcaagaacaaggacgagatcctggccctgctgaaagccctgttcctgcccaagaggctgtccatcatccactgccccggccaccagaagggccactccgccgaggcccggggcaatcggatggccgaccaggccgccagaaaggccgccatcaccgaaaccccagacaccagcaccctgctgatcgagaacagcagccccagcggcggcagcaagaggaccgccgacggcagcgagttcgagcccaagaagaagaggaaagtctaa

SEQ ID NO: 492 - RNA, 2196 nt, synthetic construct
  misc_feature 1..2196: note = Description of Artificial Sequence: Synthetic polynucleotide
  source 1..2196: mol_type = other RNA
agcggcggctccagcggcggcagcagcgggtccgagacccctggcacctccgagtccgccacccccgagagctccggaggcagcagcggcggctccagcaccctgaatatcgaggacgagtaccgcctgcacgagaccagcaaggagcccgatgtgtccctgggcagcacctggctgtccgactttccacaggcctgggccgagaccggcggcatgggcctggccgtgaggcaggcccccctgatcatccccctgaaggccaccagcacccctgtgagcatcaagcagtaccctatgtctcaggaggccaggctgggcatcaagccccacatccagagactgctggatcagggcatcctggtgccctgccagagcccatggaacacccccctgctgccagtgaagaagcctggcacaaacgactacaggccagtgcaggacctgcgcgaggtgaacaagagggtggaggacatccaccccaccgtgcccaacccctacaacctgctgtccggcctgcccccttctcaccagtggtacaccgtgctggacctgaaggatgccttcttctgcctgcgcctgcaccctaccagccagcccctgttcgccttcgagtggagagaccccgagatgggcatcagcggccagctgacctggactagactgccccagggattcaagaacagcccaaccctgttcaacgaggccctgcaccgcgacctggccgattttaggatccagcaccccgatctgatcctgctgcagtacgtggacgatctgctgctggccgccacctccgagctggattgccagcagggcaccagggccctgctgcagaccctgggcaacctgggctacagagcctccgccaagaaggcccagatttgccagaagcaggtgaagtacctgggctacctgctgaaggagggccagagatggctgaccgaggccaggaaggaaaccgtgatgggccagcctacacccaagacccccagacagctgcgggagtttctgggcaaggccggcttttgccggctgttcatccccggcttcgccgagatggccgcccccctgtaccccctgaccaagcctggcaccctgttcaactggggccccgaccagcagaaggcctaccaggagatcaagcaggccctgctgaccgcccccgccctggggctgcccgacctgaccaaaccattcgagctgttcgtggacgagaagcaggggtacgccaagggcgtgctgacccagaagctgggcccctggaggagaccagtggcctacctgagcaagaagctggaccccgtggccgccggctggcctccctgtctgagaatggtggctgccatcgccgtgctgaccaaggacgccggcaagctgaccatgggccagcccctggtgatcctggccccccacgccgtggaggccctggtgaagcagcccccagacagatggctgagcaacgccaggatgacccactaccaggccctgctgctggacaccgacagggtgcagttcggccccgtggtggccctgaaccccgccaccctgctgcccctgcccgaggagggcctgcagcacaactgcctggacatcctggctgaggcccacggcacccggcctgacctgaccgaccagcccctgcccgacgccgaccacacctggtacaccgatggatcctccctgctgcaggagggccagcggaaggccggcgccgccgtgacaaccgagaccgaggtgatctgggccaaagccctgcccgccggcaccagcgcccagcgggccgaactgatcgccctgacccaggccctgaagatggccgagggcaaaaagctgaatgtgtacaccgacagccggtatgccttcgccaccgcccacatccacggcgagatctacaggcggcggggctggctgacctccgagggcaaggagatcaagaacaaggacgagatcctggccctgctgaaggccctgttcctgcctaagaggctgtctatcatccactgccccggccaccagaagggccacagcgccgaggccagaggcaaccggatggccgaccaggccgccaggaaggccgccatcaccgagacccccgacaccagcaccctgctgatcgagaacagcagccccagcggcggctcaaagagaacagccgacggcagcgagttcgagcccaagaagaagaggaaagtctaa

SEQ ID NO: 493 - RNA, 2196 nt, synthetic construct
  misc_feature 1..2196: note = Description of Artificial Sequence: Synthetic polynucleotide
  source 1..2196: mol_type = other RNA
tccggcggcagcagcggaggcagcagcggctccgagacccccggcacctccgagagcgccacccccgagtccagcggcggcagctccggcggcagctccacactgaatatcgaggacgagtaccgcctgcacgagaccagcaaggagcccgacgtgtccctgggctccacctggctgagcgacttcccccaggcctgggccgagaccggcggcatgggcctggccgtgagacaggcccctctgatcatccccctgaaggccacctccacccccgtgagcatcaagcagtacccaatgtcccaggaggccaggctgggcatcaagccccacatccagcggctgctggatcagggcatcctggtgccctgtcagagcccctggaacacccccctgctgccagtgaagaagcccggcaccaacgactatcggcctgtgcaggacctgcgggaggtgaacaaacgggtggaggacatccaccccaccgtgcctaacccatacaacctgctgtccggcctgcccccaagccaccagtggtacaccgtgctggacctgaaggacgccttcttctgcctgcggctgcaccccaccagccagcccctgttcgccttcgagtggagggaccccgagatgggcatctccggccagctgacctggaccaggctgccccagggcttcaagaacagccccaccctgttcaacgaggccctgcaccgcgacctggccgattttagaatccagcaccctgacctgatcctgctgcagtacgtggacgacctgctgctggccgccaccagcgagctggactgccagcagggcaccagggccctgctgcagaccctgggcaacctgggctacagggccagcgccaagaaggcccagatctgccagaagcaggtgaagtacctgggctacctgctgaaggagggccagcggtggctgacagaggccagaaaggagaccgtgatgggccagcccacacccaagacccccaggcagctgcgggagttcctgggcaaggccggcttttgccggctgttcatccctggcttcgccgagatggccgccccactgtaccccctgaccaagcctgggaccctgttcaactggggccccgaccagcagaaggcctaccaggagatcaagcaggccctgctgaccgcccctgccctgggactgccagacctgaccaagcccttcgagctgttcgtggacgagaagcagggctacgccaagggcgtgctgacacagaagctgggcccatggaggagacccgtggcctacctgtccaagaagctggacccagtggccgccggctggccaccctgcctgaggatggtggccgccatcgccgtgctgaccaaggatgccggcaagctgaccatgggccagcccctggtgatcctggcccctcacgccgtggaggccctggtgaagcagccccccgacaggtggctgagcaacgccaggatgacccactaccaggccctgctgctggacaccgacagggtgcagttcggccctgtggtggccctgaaccccgccaccctgctgcccctgcccgaggagggcctgcagcacaattgcctggacatcctggccgaggcccacggaacccgccctgacctgaccgaccagcctctgcccgacgccgaccacacctggtataccgacggaagctccctgctgcaggagggccagaggaaggccggggccgccgtgacaaccgagaccgaggtgatctgggccaaggctctgcccgccggcaccagcgcccagcgggccgagctgatcgccctgacccaggccctgaagatggccgagggcaagaagctgaacgtgtacaccgactcccggtacgccttcgccaccgcccacatccacggcgaaatctacaggcggaggggctggctgaccagcgagggcaaggagatcaagaacaaggacgagatcctggccctgctgaaggccctgttcctgcccaagaggctgtctatcatccactgccccggccatcagaagggccacagcgccgaggccaggggcaaccggatggccgaccaggccgccaggaaagccgccatcaccgagacacccgatacctccaccctgctgatcgagaacagcagcccctccggcggaagcaagcgcaccgccgacggcagcgagttcgagcccaagaagaagaggaaagtctaa

SEQ ID NO: 494 - RNA, 2196 nt, synthetic construct
  misc_feature 1..2196: note = Description of Artificial Sequence: Synthetic polynucleotide
  source 1..2196: mol_type = other RNA
agcggaggcagctccggcggcagcagcggcagcgagaccccaggcaccagcgagagcgccacccccgagtccagcggcggcagctccggcggctccagcaccctgaatatcgaggacgagtatcggctgcacgagacctccaaggagcccgacgtgtccctggggtccacctggctgtccgactttccccaggcatgggctgagaccggcggcatgggactggccgtgcggcaggcccccctgatcatccccctgaaggccaccagcacccctgtgtccatcaagcagtaccccatgtcccaggaggccagactgggcatcaagccccacatccagaggctgctggatcagggcatcctggtgccttgccagtccccctggaacacccctctgctgcccgtgaagaagcctggcaccaacgattacagacccgtgcaggacctgcgcgaggtgaacaagagggtggaggacatccaccccaccgtgcccaacccatacaacctgctgtctggcctgcctccaagccaccagtggtacaccgtgctggacctgaaggacgccttcttctgcctgaggctgcaccccacctcccagcccctgttcgccttcgagtggagggacccagagatgggcatcagcggccagctgacctggacaaggctgccccagggcttcaagaatagcccaaccctgttcaacgaggccctgcacagggacctggccgacttccggatccagcaccccgacctgatcctgctgcagtacgtggacgacctgctgctggccgccaccagcgagctggactgccagcagggcacaagggccctgctgcagaccctgggcaacctgggctacagggcctcagctaagaaagcccagatctgtcagaagcaggtgaagtacctgggctacctgctgaaagagggccagaggtggctgacagaggcccgcaaggagaccgtgatggggcagcccacccccaagaccccccggcagctgagagagttcctgggcaaggccggattctgcaggctgttcatccctggcttcgccgagatggccgcccccctgtacccactgaccaagccaggcaccctgttcaactggggccccgaccagcagaaggcctaccaggagatcaagcaggccctgctgaccgcccccgccctgggcctgcccgacctgaccaagcccttcgagctgttcgtggacgaaaagcagggctacgccaaaggcgtgctgacccagaagctgggcccttggaggagacccgtggcctatctgtccaagaagctggaccctgtggccgccggctggcctccttgcctgcggatggtggccgccatcgccgtgctgaccaaggacgccggcaagctgaccatgggccagccactggtgatcctggccccccacgccgtggaggccctggtgaagcagcctcccgacagatggctgtctaacgcccggatgacccactaccaggccctgctgctggacaccgacagagtgcagttcggccccgtggtggccctgaaccccgccactctgctgcccctgccagaggagggcctgcagcacaattgcctggatatcctggccgaggcccacgggacacggccagacctgaccgatcagccactgcccgatgccgaccacacctggtacaccgacggcagcagcctgctgcaggagggccagagaaaggccggcgccgccgtgactaccgagaccgaagtgatctgggccaaggccctgccagccggcaccagcgcccagagggccgagctgatcgccctgacccaggccctgaagatggccgaggggaagaagctgaatgtgtacaccgactctaggtacgccttcgccaccgcccacatccacggcgagatctaccggcgcaggggctggctgaccagcgagggcaaggagatcaagaacaaggacgagatcctggccctgctgaaggccctgttcctgcccaagaggctgtccatcatccactgccctggccaccagaagggccacagcgccgaggccagaggcaaccggatggccgaccaggccgcccggaaggccgccatcaccgagaccccagacaccagcaccctgctgatcgagaactcctccccctccggcggcagcaagaggaccgccgacggaagcgagttcgagcccaagaagaagaggaaagtctaa

SEQ ID NO: 495 - RNA, 2196 nt, synthetic construct
  misc_feature 1..2196: note = Description of Artificial Sequence: Synthetic polynucleotide
  source 1..2196: mol_type = other RNA
agcggcggctcctcaggcggctccagcggctccgagacccccggcaccagcgagagcgccaccccagagagctccggcggcagcagcggcggcagctccactctgaacatcgaggacgagtacagactgcacgagaccagcaaggagcccgatgtgtccctgggcagcacctggctgtccgacttcccccaggcctgggccgagaccgggggcatgggcctggccgtgcggcaggcccccctgatcatccccctgaaggccaccagcacccctgtgagcattaaacagtaccccatgtcccaggaggccaggctgggcatcaagccccacatccagaggctgctggaccagggcatcctggtgccctgccagagcccctggaatacccccctgctgcccgtcaagaagcccggcacaaacgactacaggcccgtgcaggacctgagggaggtgaacaagagagtggaggacatccaccccaccgtgcctaatccctacaacctgctgtccgggctgccccccagccaccagtggtacaccgtgctggacctgaaggacgccttcttctgcctgagactgcacccaacctctcagcccctgttcgccttcgagtggcgggaccccgagatgggcatcagcgggcagctgacctggacccgcctgcctcagggcttcaagaattcccctaccctgttcaacgaggccctgcacagggacctggccgatttcagaatccagcaccccgacctgatcctgctgcagtacgtggacgacctgctgctggccgccaccagcgagctggactgccagcagggcacccgcgccctgctgcagaccctgggcaacctgggctacagggccagcgccaagaaggcccagatctgccagaagcaggtgaaatacctgggctacctgctgaaggagggccagcgctggctgaccgaggcccggaaggagaccgtgatgggccagcccacacccaagacccccaggcagctgagggagttcctgggcaaggccggcttctgcaggctgttcatcccaggcttcgccgaaatggctgcccccctgtacccactgaccaagcctggaacactgttcaactggggccctgatcagcagaaggcctaccaggagattaagcaggccctgctgaccgcccccgccctgggcctgcccgatctgaccaaacccttcgagctgttcgtggacgagaagcagggctacgccaagggcgtgctgacccagaagctgggcccttggagaaggcctgtggcctacctgtctaagaagctggaccctgtggccgccggctggcctccctgtctgagaatggtggccgccatcgccgtgctgaccaaggacgccggcaagctgaccatgggccagcccctggtgatcctggccccccacgccgtggaggccctggtgaagcagcccccagacagatggctgagcaatgcccggatgacccactaccaggccctgctgctggacaccgacagggtgcagtttggccctgtggtggccctgaaccctgccaccctgctgcccctgcccgaggagggcctgcagcacaattgcctggacatcctggccgaggcccacggcacccggcccgacctgaccgaccagcccctgcccgacgccgaccacacctggtacaccgacggcagcagcctgctgcaggaaggccagcggaaggccggcgccgccgtgaccaccgagacagaagtgatctgggccaaggctctgccagccggcaccagcgcccagagagccgagctgatcgccctgacccaggccctgaagatggccgagggcaagaagctgaacgtgtacaccgacagcaggtacgcctttgccaccgcccacatccatggcgagatctaccggaggaggggctggctgaccagcgagggcaaggagatcaagaacaaggacgagatcctggccctgctgaaggccctgttcctgcccaagagactgagcatcatccactgccccggccaccagaagggccacagcgccgaggccagaggaaaccgcatggccgaccaggctgccaggaaggccgccatcaccgagacccccgacacctccaccctgctgatcgagaactcttcccccagcggcggcagcaagagaaccgccgacggcagcgagttcgagcccaagaagaagaggaaagtctaa

SEQ ID NO: 496 - RNA, 2196 nt, synthetic construct
  misc_feature 1..2196: note = Description of Artificial Sequence: Synthetic polynucleotide
  source 1..2196: mol_type = other RNA
tccggcggctcctccggcggcagcagcggcagcgagactcctggcaccagcgagagcgccacccccgagagcagcggcggcagctccggcggctcctccaccctgaacatcgaggacgagtaccggctgcacgagaccagcaaggaaccagacgtgtccctggggtccacctggctgtccgacttcccccaggcctgggccgagaccggcggcatgggcctggccgtgaggcaggcccctctgatcatccccctgaaggccaccagcacccctgtgagcatcaagcagtatcccatgagccaggaggccaggctgggcatcaagccccatatccagcgcctgctggaccagggcatcctggtgccttgccagagcccctggaacacccccctgctgcccgtgaagaaacccggcaccaacgactaccggcctgtgcaggacctgcgggaggtgaacaagcgcgtggaggacatccaccccaccgtgcctaacccctacaacctgctgagcggcctgccccccagccaccagtggtacaccgtgctggatctgaaggacgcctttttctgtctgcggctgcaccccaccagccagcccctgtttgccttcgagtggagagaccccgagatgggcatcagcggccagctgacctggaccagactgccccagggcttcaagaacagccccaccctgttcaacgaggccctgcacagagacctggccgacttcagaatccagcacccagacctgatcctgctgcagtacgtggacgacctgctgctggccgccacctccgagctggactgccagcaggggacccgggccctgctgcagaccctgggcaacctgggctacagggccagcgccaagaaggcccagatctgccagaagcaggtgaagtacctgggatacctgctgaaggagggccagaggtggctgaccgaggcccgcaaggagaccgtgatgggccagcccacccccaagacacccaggcagctgagggagttcctgggcaaagccggcttctgcaggctgttcatccccggcttcgccgagatggccgcccctctgtaccctctgaccaagcccggcaccctgttcaactggggccccgatcagcagaaggcctaccaggagatcaagcaggccctgctgaccgccccagccctgggcctgccagatctgaccaagcctttcgagctgttcgtggatgagaaacagggctacgccaagggcgtgctgacccagaagctgggaccctggaggagacctgtggcctacctgagcaagaagctggaccctgtggccgccggctggccaccttgcctgcggatggtggccgccatcgccgtgctgaccaaggacgccggcaagctgaccatgggccagcctctggtgatcctggccccccacgccgtggaggccctggtgaaacagccccccgacagatggctgtctaatgccagaatgacccactaccaggccctgctgctggacaccgaccgggtgcagttcggcccagtggtggccctgaaccccgccaccctgctgcctctgcccgaggagggcctgcagcacaattgtctggacatcctggccgaggcccacggcaccagacccgacctgaccgatcagcccctgccagacgccgaccacacctggtataccgacggcagcagcctgctgcaggagggccagaggaaggccggcgccgccgtgaccaccgagaccgaggtgatctgggccaaggccctgccagccggcacctccgcccagagggccgagctgatcgccctgacccaggccctgaagatggccgagggcaagaagctgaacgtgtacacagattcccggtacgccttcgccaccgcccacatccacggcgagatctaccggcggcgggggtggctgaccagcgagggcaaggagatcaaaaacaaggacgagatcctggccctgctgaaggccctgttcctgcctaagagactgtctatcatccactgcccaggccaccagaaggggcactccgccgaggctcgcggcaacaggatggccgaccaggccgccagaaaggccgccatcaccgagaccccagacaccagcaccctgctgatcgagaacagctccccctctggcggctccaagaggaccgccgacggcagcgagttcgagcccaagaagaagaggaaagtctaa

SEQ ID NO: 497 - RNA, 2196 nt, synthetic construct
  misc_feature 1..2196: note = Description of Artificial Sequence: Synthetic polynucleotide
  source 1..2196: mol_type = other RNA
tctggcggcagctccggcggcagcagcggcagcgagacccccggcaccagcgagtctgccaccccagagagctccggaggcagctccggcggcagcagcaccctgaacatcgaggacgagtacaggctgcacgagacctccaaggagcccgacgtgtctctgggcagcacctggctgtccgacttccctcaggcctgggcagagaccggcggcatgggactggccgtgcgccaggcccctctgatcatccctctgaaggccaccagcacccccgtgtccatcaagcagtatcctatgtctcaggaggccaggctgggcatcaagccccacatccagcggctgctggaccagggcatcctggtgccttgccagagcccctggaacacccctctgctgcctgtgaagaagcctggcaccaacgactacagaccagtgcaggatctgagggaggtgaataagagagtggaggacatccaccctaccgtgcccaacccctacaacctgctgtccggcctgccccctagccaccagtggtacaccgtgctggacctgaaggacgccttcttctgcctgcggctgcaccccaccagccagcccctgtttgccttcgagtggagagacccagagatgggcatcagcggccagctgacctggacaagactgccccagggcttcaagaacagtcccaccctgttcaatgaggccctgcacagggacctggccgacttccggatccagcaccccgacctgattctgctgcagtatgtggacgacctgctgctggccgccaccagcgagctggactgtcagcagggcaccagagccctgctgcagaccctgggcaacctgggctaccgggcctcagccaagaaggcccagatctgccagaagcaggtgaagtacctgggctacctgctgaaggagggccagagatggctgaccgaggccagaaaggagaccgtgatgggccagcccacccccaagacccctagacagctgagggagttcctgggcaaggccggcttctgccggctgttcatccccggcttcgccgagatggctgcccctctgtaccccctgaccaagcctggcaccctgttcaattggggccccgaccagcagaaggcctaccaggagatcaagcaggccctgctgaccgcccccgccctgggcctgccagacctgaccaagcccttcgagctgttcgtggacgagaagcagggctacgccaagggcgtgctgacccagaagctgggcccttggaggagacccgtggcctacctgtcaaagaagctggatccagtggccgccggctggccaccctgcctgcggatggtggccgccatcgccgtgctgaccaaggatgccggcaaactgaccatgggccagcccctggtgatcctggccccccacgccgtggaggccctggtgaagcagccacccgacagatggctgtctaacgcccgcatgacacactaccaggccctgctgctggacaccgacagggtgcagttcggccccgtggtggccctgaaccccgccaccctgctgcccctgcctgaggagggcctgcagcacaattgcctggatatcctggccgaggcccacggcacccggcccgacctgaccgaccagcccctgcccgacgccgaccacacctggtacaccgacggcagcagcctgctgcaggagggccagaggaaggccggcgccgccgtgaccacagagaccgaggtgatctgggccaaggccctgcccgccggcaccagcgcccagcgggccgagctgatcgccctgacccaggccctgaagatggccgagggaaagaagctgaacgtgtacaccgattccagatacgccttcgccaccgcccacatccacggcgagatctacaggaggagaggctggctgacctccgagggcaaggagatcaagaacaaggacgagattctggccctgctgaaggccctgttcctgcctaagagactgagcatcatccactgccccggccaccagaagggccacagcgccgaggcccggggcaataggatggccgaccaggccgcccggaaggccgccattaccgagactccagacacctccaccctgctgatcgagaattcctcccccagcggcgggagcaagagaaccgcagacggcagcgagttcgagcccaagaagaagaggaaagtctaa

SEQ ID NO: 498 - RNA, 2196 nt, synthetic construct
  misc_feature 1..2196: note = Description of Artificial Sequence: Synthetic polynucleotide
  source 1..2196: mol_type = other RNA
agcggaggctcctccggcggcagcagcgggagcgagaccccagggaccagcgagtccgccaccccagagagcagcggcggaagcagcggcggcagcagcacactgaacatcgaggacgagtacagactgcacgagaccagcaaggagcccgacgtgtccctgggctccacctggctgtccgacttcccccaggcctgggccgagacaggcggcatgggcctggccgtgcggcaggcccccctgatcatccccctgaaagccaccagcacccccgtgagcatcaagcagtaccccatgtcccaggaggcccggctgggcatcaagcctcacatccagcggctgctggatcagggcatcctggtgccctgccagtccccctggaacacccccctgctgccagtgaagaagcccggaaccaacgactatcggccagtgcaggacctgcgggaggtgaacaagcgggtggaggatatccaccccacagtgcccaacccctacaacctgctgtccggcctgcccccctcacaccagtggtacaccgtgctggacctgaaagacgccttcttctgcctgaggctgcacccaaccagccagcccctgttcgccttcgagtggagggaccccgagatggggatcagcggccagctgacctggacccggctgccccagggcttcaagaactcccccaccctgtttaacgaggccctgcacagggacctggccgacttccggatccagcaccccgacctgatcctgctgcagtacgtggacgatctgctgctggccgccacctccgagctggactgtcagcagggcacccgggccctgctgcagaccctgggcaacctgggctaccgggccagcgccaagaaggcccagatctgccagaagcaggtgaagtacctgggctacctgctgaaggagggccagaggtggctgaccgaggcccggaaggagaccgtgatgggccagcccacccccaagacccctaggcagctgagggagttcctgggcaaggccggcttttgccgcctgtttatccctgggttcgccgagatggccgcccccctgtaccccctgaccaaaccaggcactctgttcaactggggccccgaccagcagaaggcctaccaggagatcaagcaggccctgctgaccgcccccgccctgggcctgcccgacctgaccaagccattcgagctgttcgtggacgagaagcagggctacgccaagggagtgctgacacagaagctgggcccatggaggaggcccgtggcctacctgagcaagaagctggaccccgtggccgccggctggcccccctgcctgcggatggtggccgccatcgccgtgctgaccaaggacgccggcaagctgaccatgggccagcctctggtgatcctggccccccacgccgtggaggccctggtgaagcagcccccagacaggtggctgtccaacgccaggatgactcactaccaggccctgctgctggacaccgatcgcgtgcagttcggccctgtggtggccctgaaccccgccaccctgctgcccctgcctgaagagggcctgcagcacaactgcctggacatcctggccgaggcccacggcaccagacccgacctcaccgaccagccactgcccgacgccgaccacacctggtacaccgacggcagctccctgctgcaggagggccagagaaaggccggcgccgccgtgaccaccgagaccgaggtgatctgggccaaggccctgcccgccggcacctccgcccagcgggccgagctgatcgccctgacacaggccctgaagatggccgagggcaagaagctgaacgtgtacaccgactccaggtacgccttcgccaccgcccacatccacggcgaaatctacagacgcaggggctggctgaccagcgagggtaaggagatcaagaacaaggacgagatcctggccctgctgaaggccctgttcctgcccaaacggctgtccatcatccactgccccggccaccagaagggccactccgccgaggcccggggcaaccggatggccgaccaggccgcccggaaggccgccatcaccgagacccccgacaccagcaccctgctgatcgagaacagctccccctccggcggcagcaagagaaccgccgatggcagcgagttcgagcccaagaagaagaggaaagtctaa

SEQ ID NO: 499 - RNA, 2196 nt, synthetic construct
  misc_feature 1..2196: note = Description of Artificial Sequence: Synthetic polynucleotide
  source 1..2196: mol_type = other RNA
tctggcggcagcagcggaggaagcagcggcagcgagacccccggcaccagcgagagcgccacccccgagtccagcggcggctccagcggcggcagcagcaccctgaacatcgaggacgagtaccgcctgcacgagaccagcaaggagccagacgtgtccctgggctccacctggctgtccgactttcctcaggcctgggcagagaccggcggaatgggcctggccgtgaggcaggccccactcatcatccccctcaaggccaccagcacccccgtgagcatcaagcagtaccctatgagccaggaggccaggctgggaatcaagccccacatccagagactgctggaccagggcatcctggtgccctgccagagcccatggaacacccccctgctgcccgtgaagaagcccgggaccaacgactacagacccgtgcaggacctgagagaggtgaacaagcgcgtggaggacatccaccctaccgtgcccaatccttacaacctgctgtccggcctgccccccagccaccagtggtacaccgtgctggacctgaaggacgccttcttctgcctgcggctgcaccccacctcccagcccctgttcgccttcgagtggagagaccccgagatgggcatcagcggccagctgacctggaccaggctgccacagggcttcaagaactccccaaccctgtttaacgaggccctgcacagagacctggccgacttccggattcagcacccagacctgatcctgctgcagtacgtggacgatctgctgctggccgccacaagcgagctggattgccagcagggcacccgggccctgctgcagaccctgggcaacctgggctacagggcctccgccaagaaggcccagatctgccagaagcaggtgaagtatctgggctacctgctgaaggagggccagagatggctgaccgaggcccgcaaggagaccgtgatgggccagcctacccccaagacccccaggcagctgagggagttcctgggcaaggccggcttctgcagactgttcatccccggcttcgccgagatggccgcccctctgtaccccctgacaaagcctgggaccctgttcaactggggccccgaccagcagaaggcctaccaggagatcaagcaggccctgctgaccgcccccgccctgggcctgccagacctgacaaagcccttcgagctgttcgtggacgagaagcagggctacgccaagggcgtgctgacccagaagctgggcccctggcggagaccagtggcctatctgtccaagaagctggaccctgtggccgccggctggcctccttgcctgcggatggtggccgccatcgccgtgctgaccaaggacgccggcaaactgaccatgggccagcccctggtgatcctggccccacacgcagtggaggctctggtgaagcagccccccgacaggtggctgtctaacgccagaatgacccactaccaggccctgctgctggacaccgacagagtgcagttcggccctgtggtggccctgaaccccgccaccctgctgcctctgcccgaggagggcctgcagcacaactgcctggacatcctggccgaggcccacggcacacgccccgacctgaccgaccagccactgcccgacgccgaccacacctggtacaccgacggcagcagcctgctgcaggagggccagagaaaagccggcgccgccgtgaccaccgagaccgaggtgatttgggccaaggccctgcccgccggcaccagcgcccagagagccgagctgatcgccctgacccaggccctgaagatggccgagggcaagaaactgaacgtgtacaccgactccaggtatgccttcgccaccgcccacattcacggcgagatctacaggaggagaggctggctgaccagcgagggcaaggagatcaagaataaggacgagatcctggccctgctgaaggccctgttcctgcccaagcggctgtccatcatccactgcccaggccaccagaagggccacagcgccgaggccagaggcaacagaatggccgaccaggccgcccgcaaggccgccatcaccgagacccccgatacctccaccctgctgatcgagaacagctcccccagcggcggcagcaagaggaccgccgacggctccgagttcgagcccaagaagaagaggaaagtctaa

SEQ ID NO: 500 - RNA, 2196 nt, synthetic construct
  misc_feature 1..2196: note = Description of Artificial Sequence: Synthetic polynucleotide
  source 1..2196: mol_type = other RNA
agcggcggcagcagcggcggcagcagcggcagcgagacccccggcaccagcgagtccgccacccccgagagcagcggcggctcaagcggcggcagcagcaccctgaacatcgaggacgagtacagactgcacgagaccagcaaggagcccgacgtgtccctgggctctacctggctgagcgacttcccccaggcctgggccgagaccggcggaatgggcctggccgtgagacaggccccactgatcatcccactgaaggccaccagcacccccgtgagcatcaagcagtaccctatgtcacaggaggccagactgggcatcaagccacacatccagagactgctggaccagggcatcctggtgccctgccagagcccatggaacacccccctgctgcccgtcaagaagcccggcaccaacgactacaggcccgtgcaggacctgcgggaggtgaacaagcgcgtggaggacatccaccctaccgtgcccaacccctacaacctgctgtccggcctgccacccagccatcagtggtacaccgtgctggacctgaaggacgccttcttctgcctgagactgcaccccacctcccagcctctgttcgccttcgagtggagagaccccgagatgggcatctccggccagctgacttggacaagactgccccagggcttcaagaattctccaaccctgttcaacgaggccctgcaccgggacctggccgacttcaggatccagcacccagacctgatcctgctgcagtacgtggacgacctgctgctggccgccaccagcgagctcgactgccagcagggcacccgggccctgctgcagactctgggcaacctgggctacagggccagcgccaagaaggcccagatctgccagaagcaggtgaagtacctgggctacctgctgaaggagggccagaggtggctgaccgaggccaggaaggagaccgtgatgggccagccaacccctaagacccccagacagctgagggagttcctgggcaaggccggcttctgccggctgttcatccccggcttcgccgagatggccgcccccctgtaccccctgaccaagcctggcaccctgttcaactggggccccgaccagcagaaggcctaccaggagatcaagcaggccctgctgaccgcccccgccctgggcctgcccgatctgaccaagccattcgagctgttcgtggacgagaaacagggctacgccaagggcgtgctgacccagaagctgggcccctggaggagacctgtggcctacctgagcaaaaagctggacccagtggccgccgggtggcccccctgcctgagaatggtggccgccatcgccgtgctgaccaaggacgccggcaagctgaccatgggacagcctctggtgatcctggccccccacgccgtggaggccctggtgaagcagccccccgataggtggctgagtaatgcccggatgacccactaccaggccctgctgctggacaccgacagggtgcagttcggccccgtggtggccctgaaccccgccaccctgctgccactgcccgaggagggcctgcagcataactgcctggacatcctggccgaggcccacggcaccaggcccgacctgaccgatcagcctctgcccgacgccgatcacacctggtacaccgatggcagcagcctgctgcaggagggccagagaaaggccggcgccgccgtgaccaccgagaccgaggtgatctgggccaaggccctgcccgccggcaccagcgcccagcgggccgaactgatcgccctgacccaggccctgaagatggccgagggcaagaagctgaacgtgtacaccgacagccggtacgccttcgccaccgctcacatccacggcgagatttacaggagaagaggctggctgaccagcgaaggcaaggagatcaagaacaaggacgagattctggccctgctgaaggccctgttcctgcctaagagactgtctatcatccactgccccggccaccagaaaggccacagcgccgaggccaggggcaacaggatggccgaccaggccgcccggaaggccgccatcaccgagacccccgacaccagcaccctgctgatcgagaactccagcccttccggcggctccaagaggactgccgacggctccgagttcgagcccaagaagaagaggaaagtctaa

SEQ ID NO: 501 - RNA, 2196 nt, synthetic construct
  misc_feature 1..2196: note = Description of Artificial Sequence: Synthetic polynucleotide
  source 1..2196: mol_type = other RNA
agcggcggaagcagcggcggctcctccggcagcgagacccccggcaccagcgagtccgccacccccgagagcagcggcggctccagcggcggctccagcaccctgaacatcgaggacgagtacaggctgcacgagaccagcaaggagcccgacgtgtctctgggcagcacctggctgtccgacttcccacaggcctgggccgagaccggcggcatgggcctggccgtgagacaggcccctctgatcatcccactgaaggccacctccaccccagtgtccatcaaacagtaccccatgagccaggaggcccggctgggcatcaagccacacatccagaggctgctggaccagggcatcctggtgccctgccagagcccctggaatacccccctgctgcccgtgaagaagcccggcaccaacgactacaggccagtgcaggatctgcgggaggtgaacaagcgggtggaagatatccaccctaccgtgcccaacccctacaacctgctgagcggcctgcctccctcccatcagtggtacaccgtgctggacctgaaggacgccttcttctgcctgcgtctgcaccctaccagccagcccctgttcgccttcgagtggagggacccagagatgggcatcagcggccagctgacttggaccaggctgcctcagggctttaagaattcccccaccctgtttaacgaggccctgcacagagacctggccgatttcaggatccagcaccccgacctgatcctgctgcagtacgtggacgacctgctgctggccgccacctccgagctggattgccagcagggcacccgcgctctgctgcagaccctgggcaacctgggctacagagccagcgccaagaaggcccagatttgccagaagcaggtgaagtacctggggtacctgctgaaagagggccagagatggctgaccgaggccagaaaggagaccgtgatgggccagcccaccccaaagacacccaggcagctgcgggagttcctgggcaaggccggcttctgcagactgtttatccccggcttcgccgagatggccgcccccctgtaccctctgaccaagcctggaaccctgtttaactggggccccgatcagcagaaggcctaccaggagatcaagcaggccctgctgaccgcccccgccctggggctgcccgacctgaccaagcccttcgagctgttcgtggacgagaagcagggctacgccaagggcgtgctgacccagaagctggggccctggaggagacccgtggcctacctgtctaagaagctggaccccgtggccgccggctggcccccctgcctgagaatggtggccgccatcgccgtgctgacaaaggatgccggcaagctgaccatgggccagcccctggtgatcctggccccccacgctgtggaggccctggtgaagcagcctcccgaccggtggctgagcaacgccagaatgacccactaccaggccctgctgctggacacagatcgggtgcagttcggccccgtggtggccctgaaccccgccaccctgctgcccctgcctgaggagggcctgcagcacaactgcctggacatcctggccgaggcccacggcacccggcccgatctgaccgaccagcccctgcccgacgccgaccacacctggtacaccgatggaagcagcctgctgcaggagggccagagaaaggccggggccgccgtgaccaccgagaccgaggtgatctgggccaaggccctgcccgccggcacctccgcccagagggccgagctgatcgccctgacccaggccctgaagatggccgagggcaagaagctgaacgtgtacaccgacagcaggtacgccttcgccaccgcccacatccacggcgagatctacaggcggagaggctggctgactagcgagggcaaggagatcaagaacaaggacgagatcctggccctgctgaaggccctgttcctgccaaagcgcctgagcattatccactgccccggccaccagaagggccacagcgccgaggccagaggcaacaggatggccgaccaggccgccaggaaggccgccatcaccgagacccctgacaccagcaccctgctgatcgagaacagctcccccagcggcggctccaagaggacagccgatggcagcgagttcgagcccaagaagaagaggaaagtctaa

SEQ ID NO: 502 - RNA, 2196 nt, synthetic construct
  misc_feature 1..2196: note = Description of Artificial Sequence: Synthetic polynucleotide
  source 1..2196: mol_type = other RNA
agcggcggcagcagcggcggcagcagcggcagcgagacccccggcaccagcgagagcgccacccccgagtctagcggcggcagcagcggcgggagcagcactctgaacatcgaggacgagtaccgcctgcacgagaccagcaaagagcccgacgtgtccctgggctccacctggctgagcgactttcctcaggcctgggccgagaccggcggcatgggcctggccgtgcggcaggctcctctgatcatcccactgaaggccaccagcacccccgtgagcatcaagcagtatcccatgagccaggaggccaggctgggcatcaagccccacatccagaggctgctggaccagggcatcctggtgccctgccagagcccctggaacacccccctgctgcccgtgaagaagcccggcaccaacgattacagacccgtgcaggacctgcgggaggtgaacaagagggtggaggatatccaccccaccgtgcccaacccttacaacctgctgtccggcctgccccccagccaccagtggtacaccgtgctggacctgaaggacgccttcttctgcctgcgcctgcaccccacaagccagccactgttcgccttcgagtggagggatcccgagatgggcatctccggccagctcacctggacccggctgccccagggcttcaagaacagcccaaccctgtttaacgaggccctgcacagagacctggccgacttcaggattcagcacccagacctgatcctgctgcagtacgtggacgatctgctgctggccgccacctccgagctggattgtcagcagggcaccagggccctgctgcagaccctgggcaacctgggctacagggcctccgccaagaaggcccagatctgccagaagcaggtgaagtacctgggctacctgctgaaggagggccagagatggctgaccgaggccagaaaggagaccgtgatgggccagcccacacccaagacacccaggcagctgagggagttcctgggcaaggccggcttctgcagactgtttatccctggcttcgccgagatggccgccccactgtacccactgaccaagcccggcaccctgttcaactggggccccgaccagcagaaggcctaccaggagatcaagcaggccctgctgaccgcccctgccctgggcctgcccgatctgaccaagccattcgagctgttcgtggacgagaaacagggctacgccaagggcgtgctgacccagaagctgggcccctggaggagacccgtggcctacctgagcaagaagctggaccccgtggccgccggatggcctccctgtctgcggatggtggccgccatcgccgtgctgaccaaggacgccggcaagctgaccatgggccagccactggtgatcctggcccctcacgccgtggaggccctggtgaagcagcccccagacaggtggctgtccaacgccagaatgacccactaccaggccctgctgctggacaccgacagagtgcagttcggccccgtggtggccctgaacccagccaccctgctgcctctgcctgaagagggcctgcagcacaattgcctggacatcctggccgaggcccacggcaccaggcccgacctgaccgatcagcccctgcccgacgccgaccacacctggtacaccgacggcagcagcctgctgcaggaaggacagagaaaggccggcgccgccgtgaccaccgagaccgaggtgatctgggccaaggccctgcccgccggcaccagcgcccagagagccgagctgatcgccctgacccaggccctgaagatggccgagggcaaaaagctgaacgtgtacaccgacagcagatacgccttcgccaccgcccacatccatggcgagatctataggcggagaggctggctgaccagcgaaggcaaggagatcaagaacaaggacgagatcctggctctgctgaaggccctgttcctgcctaagagactgtccatcatccactgccccggccaccagaagggccacagcgccgaggcccggggcaatagaatggccgaccaggccgccaggaaggccgccatcaccgagaccccagacacctccaccctgctgatcgagaacagcagccccagcggcggcagcaagaggaccgcagacgggagcgagttcgagcccaagaagaagaggaaagtctaa

SEQ ID NO: 503 - RNA, 2196 nt, synthetic construct
  misc_feature 1..2196: note = Description of Artificial Sequence: Synthetic polynucleotide
  source 1..2196: mol_type = other RNA
agcggcggcagcagcggcggcagcagcggaagcgagacccccggcaccagcgagagcgccacccccgagagctccggcggaagctccggcggctctagcaccctgaacatcgaggacgagtaccggctgcacgagacctccaaggagcccgatgtgtccctgggcagcacctggctgtccgactttccccaggcctgggccgagaccggcggcatgggactggccgtgcggcaggcccctctgatcatccccctgaaggccaccagcacccccgtgtccatcaaacagtaccctatgagccaggaggccaggctgggcatcaagccccacattcagaggctgctggatcagggcatcctggtgccttgccagagtccctggaacacccctctgctgcctgtgaagaagccaggcaccaatgactacaggcctgtgcaggatctgcgcgaggtgaacaagcgggtggaggacatccacccaaccgtgccaaacccttacaacctgctgtccggcctgcccccctcccaccagtggtacaccgtgctggacctgaaggatgccttcttctgcctgagactgcaccccacctcccagcccctgttcgccttcgagtggcgggatcccgagatgggcatctccggccagctgacctggaccagactgccccagggcttcaagaattcccccaccctgttcaacgaagccctgcacagggacctggccgatttccggatccagcaccctgacctgattctgctgcagtatgtggatgacctgctgctggccgccaccagcgagctggactgccagcagggcaccagagccctgctgcagaccctgggcaatctgggatatagggccagcgccaagaaagcccagatctgccagaagcaggtgaagtacctgggctacctgctgaaggagggccagagatggctgaccgaggcaagaaaggagactgtgatgggccagcccacccccaagacccccaggcagctgagagagttcctgggcaaagccggcttctgcagactgttcatccccggctttgccgagatggccgccccactgtaccctctgaccaagcccggcaccctgtttaactggggccccgaccagcagaaggcctaccaggagatcaagcaggccctgctgaccgcccctgccctgggcctgcccgacctgactaagcctttcgagctgttcgtggacgagaagcagggctacgccaagggcgtgctgacccagaagctgggcccatggcgccggcccgtggcctacctgtccaagaagctggatcctgtggccgccggctggcccccctgcctgcggatggtggccgccatcgccgtgctcaccaaggacgccggcaagctgaccatgggccagcccctggtgatcctggccccacacgccgtggaggccctggtgaagcagccacccgacagatggctgtccaacgccagaatgacccactatcaggccctgctgctggacaccgaccgggtgcagtttggccccgtggtggccctgaaccccgccaccctgctgcccctgcccgaggagggcctgcagcacaattgcctggacatcctggccgaggcccacggcaccaggcccgatctgaccgaccagcccctgcccgacgccgaccacacctggtacacagacggctccagcctgctgcaggagggccagaggaaggccggcgccgccgtgaccaccgaaaccgaggtgatctgggccaaggccctgcctgccggcaccagcgcccagagggccgagctgatcgccctgacccaggccctgaagatggccgagggcaagaagctgaatgtgtacaccgacagcaggtatgccttcgccaccgcccacatccacggggagatctacagacgcagaggctggctgaccagcgagggcaaggagatcaagaacaaggacgagatcctggccctgctgaaggccctgttcctgcccaagcgcctgtccatcatccactgccccggccaccagaagggccacagcgccgaggcccggggcaataggatggccgaccaggccgccagaaaggccgccatcaccgaaacccccgacacctcaaccctgctgatcgagaacagcagccccagcggcggcagcaagaggaccgccgacggcagcgagttcgagcccaagaagaagaggaaagtctaa

SEQ ID NO: 504 - RNA, 2196 nt, synthetic construct
  misc_feature 1..2196: note = Description of Artificial Sequence: Synthetic polynucleotide
  source 1..2196: mol_type = other RNA
agcggaggctccagcggcggcagctccggctccgagacccccggcaccagcgagagcgccacccccgagagctccggcggcagcagcggcggcagctccaccctgaacatcgaggacgaatacaggctgcacgagaccagcaaggagcccgacgtgtccctgggcagcacctggctgtccgactttccccaggcctgggccgagaccggcggcatgggcctggccgtgcggcaggcccccctgatcatccccctgaaggccaccagcaccccagtgagcatcaagcagtaccccatgtcccaggaggccaggctgggcatcaagccccacatccagaggctgctggaccagggcatcctggtgccctgccagagcccctggaacacccctctgctgcccgtgaagaagcccggcaccaacgactacaggcccgtgcaggacctgcgggaggtgaacaagcgcgtggaggacattcaccccaccgtgcccaacccctacaacctgctgtccggcctgcccccttctcaccagtggtacaccgtgctggacctgaaggacgccttcttctgcctgagactgcaccccacaagccagcctctgttcgccttcgagtggagagaccccgagatgggcatctccggccagctgacatggacccgcctgccccagggctttaagaacagccctaccctgttcaacgaggccctgcacagggacctggccgacttcaggatccagcaccccgacctgatcctgctgcagtatgtggacgatctgctgctggccgccacctccgagctggactgccagcagggcactcgggccctgctgcagacactgggcaatctgggctacagggcttccgccaagaaggcccagatctgccagaagcaggtgaagtacctgggctatctgctgaaggagggccagagatggctgaccgaggccagaaaggagaccgtgatgggccagcccacccccaagacccccagacagctgagggagttcctgggcaaggccgggttctgcagactgttcatccctggcttcgccgagatggctgcccccctgtacccactgaccaagcccggcaccctgtttaattggggcccagaccagcagaaggcctaccaggaaatcaagcaggccctgctgaccgcccccgccctgggcctgccagacctgacaaagcccttcgagctgttcgtggacgagaagcagggctacgccaagggcgtgctgacccagaagctgggaccctggcggaggcctgtggcctacctgagcaagaagctggacccagtggccgccggctggcccccatgcctgcggatggtggccgccatcgccgtgctgaccaaggacgccggcaagctgaccatgggccagcctctggtgatcctggccccccacgccgtggaggccctggtgaagcagccccccgacaggtggctgtccaacgccaggatgacccactaccaggccctgctgctggacaccgatcgggtgcagttcggccccgtggtggccctgaaccccgccaccctgctgcccctgccagaggaggggctgcagcacaactgcctggacatcctggccgaggcccacggcacccggcccgacctgaccgaccagcctctgcccgatgccgatcacacctggtacacagacggctccagcctgctgcaggaggggcagagaaaggccggcgccgccgtgaccacagagaccgaggtgatctgggccaaggccctgcccgccggcacctccgcccagcgcgccgagctgatcgccctgacacaggccctgaagatggccgagggcaagaagctgaacgtgtacaccgacagcaggtacgccttcgccaccgcccacatccacggcgagatctacaggaggcggggctggctgaccagcgagggcaaggagatcaagaacaaggacgagatcctggcactgctgaaggccctgttcctgccaaaacgcctgtctattatccactgcccgggccaccagaagggccactccgccgaggccaggggcaacagaatggccgaccaggccgccaggaaggccgccatcaccgagaccccagataccagcaccctgctgatcgagaattccagtccaagcggcggctccaagcggaccgccgacggctccgagttcgagcccaagaagaagaggaaagtctaa

SEQ ID NO: 505 - RNA, 2196 nt, synthetic construct
  misc_feature 1..2196: note = Description of Artificial Sequence: Synthetic polynucleotide
  source 1..2196: mol_type = other RNA
tctggcggcagcagcggcggcagcagcggctccgagacccccggcaccagcgagagcgccacccccgagagcagcggcggcagcagcggcggcagctccacactgaatatcgaggacgagtaccggctgcacgagacctccaaggagcccgacgtgagcctgggcagcacctggctgtccgactttccccaggcctgggccgagaccggcggcatgggcctggccgtgcggcaggcccccctgatcatccccctgaaggccacctccacccccgtgtccatcaagcagtaccccatgagccaggaggccaggctgggcatcaagccccacatccagcggctgctggaccagggcatcctggtgccctgccagtccccctggaacaccccactgctgcccgtgaagaagcctggcaccaacgactacaggcccgtgcaggacctgagggaggtgaacaagagagtggaggacatccaccccaccgtgcctaatccctacaacctgctgagcggcctgcccccctcccaccagtggtacaccgtgctggacctgaaggacgccttcttctgcctgcggctgcaccctaccagccagcccctgttcgccttcgagtggagagaccccgagatgggcatcagcggacagctgacctggacccggctgccccagggattcaagaacagcccaacactgtttaacgaggccctgcaccgggacctggccgacttccggatccagcaccccgacctgatcctgctgcagtacgtggacgacctgctgctggccgccacctctgagctggactgccagcagggcaccagggccctgctgcagaccctgggcaacctgggataccgggccagcgccaagaaggcccagatctgtcagaagcaggtgaagtacctgggctacctgctgaaggagggccagaggtggctgaccgaggccagaaaggagaccgtgatgggccagcccacccctaagacccccagacagctgagagagtttctgggaaaggccggcttctgcagactgttcatccccggcttcgccgagatggccgcccccctgtaccctctgaccaagccaggcaccctgttcaactggggccccgaccagcagaaggcctaccaggagatcaagcaggccctgctgaccgcccccgccctgggcctgccagacctgaccaaaccttttgagctgttcgtggacgagaagcagggctacgccaagggggtgctgacccagaagctgggcccctggagaaggcccgtggcctacctgtccaagaagctggaccccgtggccgccggctggcccccatgcctgaggatggtggccgccatcgccgtgctgaccaaggacgccggcaagctgaccatgggccagcctctggtgatcctggccccccacgccgtggaggccctggtgaagcagccacccgatagatggctgtccaacgcccggatgacacactaccaggccctgctgctggacaccgacagggtgcagttcggccccgtggtggccctgaaccctgccaccctgctgcccctgcccgaggagggcctgcagcacaactgcctggacatcctggccgaggcccacggcaccagacccgatctgaccgaccagcccctgcccgacgccgaccacacttggtacaccgatggcagcagcctgctgcaggagggccagaggaaggccggggccgccgtgaccaccgagaccgaagtgatctgggccaaggccctgcctgccggcaccagcgcccagcgggccgagctgatcgccctgacacaggccctgaagatggccgagggcaagaagctgaacgtgtacacagactccagatacgccttcgccaccgcccacatccacggcgagatctacagacgcagaggctggctgacctccgagggcaaggagatcaagaacaaagacgagatcctggccctgctgaaggccctgttcctgccaaagagactgtctatcatccactgtcccggccaccagaagggccacagcgccgaggccagaggcaatagaatggccgaccaggccgcccggaaggccgccatcacagagaccccagacaccagcaccctgctgatcgagaactcctccccctccggcgggagcaagagaaccgccgacggcagcgagttcgagcccaagaagaagaggaaagtctaa

SEQ ID NO: 506 - RNA, 2196 nt, synthetic construct
  misc_feature 1..2196: note = Description of Artificial Sequence: Synthetic polynucleotide
  source 1..2196: mol_type = other RNA
agcggcggctctagcggcggcagcagcggcagcgagacccctggcacctccgagagcgccacacccgagtccagcggcggcagcagcggcggctcctctaccctgaacatcgaggacgagtacagactgcacgagacctccaaggagcccgacgtgagcctgggcagcacctggctgtcagacttccctcaggcctgggccgagaccggcggcatgggcctggccgtgcggcaggcccccctgatcatccccctgaaggccaccagcacccccgtgagcatcaaacagtaccccatgtcccaggaggcccgcctgggcatcaagccccacatccagaggctgctggaccagggcatcctggtgccctgtcagtctccttggaatacccccctgctgcccgtgaagaagcccggcaccaacgactacaggcccgtgcaggacctgcgggaggtgaacaagcgggtggaggacatccaccccaccgtgcccaatccatacaacctgctgagcggcctgccaccatcccaccagtggtacaccgtgctggacctgaaggacgccttcttctgcctgcggctgcaccccaccagccagcccctgttcgccttcgagtggagggaccctgagatgggcatcagcggccagctgacctggaccagactgcctcagggctttaagaacagccctaccctgttcaacgaggccctgcacagagatctggccgacttccgcatccagcaccccgacctgattctgctgcagtacgtggacgacctgctgctggccgccacctccgagctggactgccagcagggcacaagagccctgctgcagaccctgggcaacctgggctacagggccagcgccaagaaggcccagatctgccagaagcaggtgaagtacctgggctacctgctgaaggagggccagaggtggctgaccgaggccagaaaggagaccgtgatgggccagccaacccccaagaccccccggcagctgagggagttcctgggcaaggccggcttctgcagactgtttatccccggattcgccgagatggccgcccctctgtatcccctgaccaagcctggcaccctgttcaactggggccccgaccagcagaaggcctaccaggagatcaagcaggccctgctgaccgcccccgccctgggcctgcctgacctgaccaagcccttcgagctgttcgtggacgagaagcagggctacgccaagggcgtgctgacacagaaactgggcccctggcggcgccctgtggcctacctgtccaagaagctggaccccgtggccgccggctggcccccctgcctgcggatggtggccgctatcgccgtgctgaccaaggacgccggcaagctgaccatgggccagccactggtgatcctggccccccacgccgtggaggccctggtgaagcagccccccgaccggtggctgtctaacgccagaatgactcactaccaggccctgctgctggacaccgatcgggtgcagttcggccctgtggtggccctgaacccagccacactgctgccactgcccgaggagggcctgcagcacaactgcctggacatcctggccgaggcccacggcacccggcccgacctgaccgatcagcccctgcccgacgccgaccacacttggtacaccgatggcagcagcctgctgcaggagggccagagaaaggccggggccgccgtgaccaccgagaccgaggtgatctgggctaaggccctgcccgccggcaccagcgcccagagagccgagctgatcgccctgacccaggccctgaaaatggccgagggcaagaagctgaatgtgtacaccgactccagatacgccttcgccacagcccacatccacggcgagatctatcggaggaggggctggctgaccagcgaggggaaggagatcaagaacaaggacgagatcctggccctgctgaaggccctgttcctgccaaaacgcctgtctatcatccactgccccggccaccagaagggccactccgccgaggccaggggcaacagaatggccgaccaggccgccaggaaggccgccatcaccgagacccccgacacctccaccctgctgatcgagaacagcagccccagcggcggctccaagaggacagccgacggctccgagttcgagcccaagaagaagaggaaagtctaa

SEQ ID NO: 507 - RNA, 2196 nt, synthetic construct
  misc_feature 1..2196: note = Description of Artificial Sequence: Synthetic polynucleotide
  source 1..2196: mol_type = other RNA
agcggcgggtcctccggcggctccagcggctctgagacccccggcaccagcgagtccgccacccccgagtccagcggcggctcctccggcggaagctccaccctgaatatcgaggacgagtacaggctgcacgagaccagcaaggagcccgacgtgagcctgggctccacctggctgtccgactttccacaggcctgggccgagacaggcggcatgggcctggccgtgcgccaggcccctctgatcatccccctgaaggccaccagcaccccagtgagcatcaagcagtaccccatgagccaggaggccagactgggcatcaagcctcacattcagagactgctggaccagggcatcctggtgccctgccagagcccctggaacacacctctgctgcccgtgaagaagcccggcaccaacgactatagacccgtgcaggacctgagagaggtgaacaagagggtggaggacatccatcctaccgtgcctaatccctacaatctgctgtctggactgcctcctagccaccagtggtacaccgtgctggacctgaaggatgccttcttctgcctgcgcctgcacccaacctcccagcccctgttcgccttcgagtggagagatcctgagatgggcatcagcggccagctgacctggaccagactgccccagggattcaagaatagccccacactgttcaacgaggccctgcaccgcgacctggccgacttcagaatccagcatcctgacctgatcctgctgcagtacgtggacgacctgctgctggccgccacctccgagctggactgccagcagggaacccgcgccctgctgcagaccctgggcaacctgggctacagggccagcgccaagaaggcccagatctgccagaagcaggtgaagtacctgggctacctgctgaaggagggccagagatggctgaccgaggccaggaaagagaccgtgatgggccagcccaccccaaagacccctcggcagctgcgggagttcctgggcaaggccggcttctgcagactgttcatccccggcttcgccgagatggccgcccccctgtaccccctgaccaagcctggcaccctgttcaactggggccccgaccagcagaaggcctaccaggagatcaagcaggccctgctgacagcccccgccctgggactgcccgacctgaccaagcctttcgagctgttcgtggacgagaagcagggctacgccaagggcgtgctgacccagaagctgggcccatggcggaggcccgtggcctacctgtccaagaagctggaccccgtggccgccggctggcccccctgcctgcgcatggtggccgccatcgccgtgctgaccaaggacgccggcaagctgaccatgggccagccactggtgatcctggccccacacgccgtggaggccctggtgaagcagccccccgacagatggctgtccaacgccaggatgacacactaccaggccctgctgctggacaccgacagagtgcagtttggccccgtggtggccctgaatcccgccacactgctgcccctgcctgaggagggcctgcagcacaactgcctggacatcctggccgaggcccacggcaccagacccgacctgaccgaccagcccctgcccgacgccgaccacacctggtacaccgatggcagcagcctgctgcaggagggccagagaaaggccggcgccgccgtgaccaccgagaccgaagtgatctgggccaaggccctgcctgccggcacaagcgcccagagggccgagctgattgccctgacccaggccctgaagatggccgagggcaagaagctgaacgtgtacaccgacagcaggtacgccttcgccaccgcccacattcacggcgagatctacaggagaaggggctggctgaccagcgagggcaaggagatcaagaacaaagacgagatcctggccctgctgaaggccctgttcctgcccaagaggctgtctatcatccactgccccggccaccagaagggccactccgccgaggccagaggcaacaggatggccgaccaggccgctaggaaggccgccatcaccgaaacccccgacaccagcacactgctgatcgagaacagcagccctagcggcggcagcaagagaaccgccgacggcagcgagttcgagcccaagaagaagaggaaagtctaa

SEQ ID NO: 508 - RNA, 2196 nt, synthetic construct
  misc_feature 1..2196: note = Description of Artificial Sequence: Synthetic polynucleotide
  source 1..2196: mol_type = other RNA
tccggaggcagctctggcggcagcagcggaagcgagacccccggcaccagcgagagcgccacacccgagtctagcggcggcagcagcggcggcagctccaccctgaatatcgaggacgagtacaggctgcacgagaccagcaaggagcccgatgtgtctctgggcagcacctggctgagcgatttcccccaggcctgggccgagaccggcggcatgggactggccgtgcggcaggcccctctgattatcccactgaaggccacctccacccctgtgagcatcaagcagtatcccatgtcccaggaggcccggctgggaatcaagccccacatccagagactgctggaccagggcatcctggtgccctgccagagcccctggaacaccccactgctgcccgtgaagaagccaggcaccaacgactacagacccgtgcaggatctgcgcgaggtgaacaagagagtggaggatatccaccccaccgtgccaaacccatacaacctgctgagcggcctgccccctagccaccagtggtacaccgtgctggacctgaaggatgccttcttctgcctgagactgcaccctacctctcagccactgttcgccttcgagtggcgggacccagagatgggcatcagcgggcagctgacctggaccaggctgccccagggcttcaagaatagccctaccctgttcaacgaggccctgcacagggacctggccgacttcagaatccagcaccccgacctgatcctgctgcagtacgtggacgacctgctgctggccgccacctccgagctggattgtcagcagggcaccagggccctgctgcagacactgggcaacctgggctacagggccagcgccaagaaggcccagatctgccagaagcaggtgaagtacctgggctacctgctgaaggagggccagcggtggctgaccgaggcccggaaggagaccgtgatgggccagcccacccccaagaccccaagacagctgagggagttcctgggaaaggccggcttctgccggctgttcatccccggcttcgccgagatggccgcccccctgtaccctctgaccaaacccggcaccctgttcaattggggccccgatcagcagaaggcctaccaggagattaagcaggccctgctgaccgcccctgccctgggcctgcccgacctgaccaagccattcgagctgttcgtggacgagaagcagggctacgccaagggcgtgctgacccagaagctgggcccttggcggagacccgtggcctacctgtccaagaagctggaccccgtggccgccggctggcccccctgcctgcggatggtggccgccatcgccgtgctgaccaaggacgccggaaagctgaccatgggccagcccctggtgatcctggccccccacgccgtggaggccctggtgaagcagccccctgacagatggctgtccaatgccaggatgacccactaccaggccctgctgctggacaccgacagagtgcagtttggccctgtggtggccctgaaccctgccaccctgctgcctctgcccgaggagggcctgcagcacaactgcctggacatcctggccgaggcccacggcacccggcccgacctgaccgaccagcctctgcccgacgccgaccacacctggtacaccgacggcagctccctgctgcaggagggccagaggaaggccggcgccgccgtgaccaccgaaaccgaggtcatctgggccaaggccctgcccgccggcaccagcgcccagagggccgagctgatcgccctgacccaggccctgaagatggccgagggcaagaagctgaacgtgtacaccgacagtaggtacgccttcgccaccgcccacatccacggcgagatctaccggaggagaggctggctgaccagcgagggcaaggagatcaagaacaaagacgagatcctggccctgctgaaggccctgttcctgcccaagaggctgagcatcatccactgccctggccaccagaagggccacagcgccgaggccaggggaaaccggatggccgatcaggccgcccggaaggccgccatcaccgagacccccgacaccagcaccctgctgatcgagaactctagcccaagcggcggcagcaagagaaccgccgacgggtccgagttcgagcccaagaagaagaggaaagtctaa

SEQ ID NO: 509 - RNA, 2196 nt, synthetic construct
  misc_feature 1..2196: note = Description of Artificial Sequence: Synthetic polynucleotide
  source 1..2196: mol_type = other RNA
agcggcggctctagcggcggcagcagcggctccgagacccccggcaccagcgagagcgccacccccgagagcagcggcggcagcagcggcggctccagcaccctgaacatcgaggacgagtatagactgcacgagaccagcaaggagcccgacgtgagcctgggctccacctggctgtccgactttccacaggcctgggccgagaccggcggcatgggcctggccgtgcggcaggcccctctgatcatcccactgaaggccaccagcacccccgtgtccattaagcagtaccctatgtcacaggaggccaggctgggcatcaagccccacatccagaggctgctggaccagggcatcctggtgccctgccagtccccctggaacaccccactgctgcccgtgaagaagcccggcaccaacgactacaggcccgtgcaggacctgcgggaggtgaacaagcgggtggaggacatccaccctaccgtgcctaacccctataacctgctgtctggcctgcctcccagccaccagtggtacacagtgctggatctgaaggacgccttcttctgcctgcgcctgcaccccacctcccagccactgttcgccttcgagtggagagaccccgagatgggcatctctgggcagctgacctggacccgcctgcctcagggcttcaagaactcccctaccctgttcaacgaggccctgcacagggacctggccgacttcagaatccagcaccccgacctgatcctgctccagtacgtggacgacctgctgctggccgccacctccgagctggattgccagcagggcacacgggccctgctgcagaccctgggaaatctgggctaccgcgccagcgccaagaaggctcagatctgtcagaagcaggtgaaatacctgggctacctgctgaaggagggacagaggtggctgaccgaggccaggaaggagaccgtgatgggccagcccacccctaagacccccaggcagctgcgcgagttcctgggcaaggccggcttctgcaggctgttcatccccggcttcgccgagatggccgcccccctgtaccccctgacaaagcccggcaccctgttcaactggggccccgaccagcagaaggcctaccaggagatcaagcaggccctgctgaccgccccagccctggggctgcccgacctgaccaagcccttcgagctgttcgtggacgagaagcagggctacgccaagggcgtgctgacccagaagctgggcccatggagaaggcccgtggcctacctgagcaagaagctggatcctgtggccgccggctggcctccctgtctgcgcatggtggccgccatcgccgtgctgaccaaggacgccggcaagctgaccatgggccagcccctggtgatcctggccccccacgccgtggaggccctggtgaagcagccccccgaccggtggctgtctaacgccagaatgacccactaccaggccctgctgctggacaccgaccgggtgcagttcggacccgtggtggccctgaaccccgccacactgctgcctctgcccgaggagggcctgcagcacaactgcctggacatcctggccgaggcccacggcacaaggcctgacctgaccgatcagcccctgcccgacgccgaccacacctggtacacagacggcagcagcctgctgcaggagggccagcgcaaggccggcgccgccgtgacaaccgagaccgaggtgatttgggccaaggccctgcccgccggcaccagcgcccagcgggccgagctgatcgccctgacccaggccctgaagatggccgagggcaagaagctgaacgtgtacaccgacagccgctacgccttcgccaccgcccacatccacggcgagatctacaggaggaggggctggctgaccagcgaggggaaggagatcaagaacaaggacgagatcctcgccctgctgaaggccctgttcctgcctaagagactgagcatcatccactgtcctggccaccagaagggccactcagccgaggcccggggaaatagaatggccgaccaggccgcccggaaggccgccatcaccgagaccccagacaccagcaccctgctgatcgaaaacagctcccccagcggcggcagcaagaggaccgccgatggcagcgagttcgagcccaagaagaagaggaaagtctaa

SEQ ID NO: 510 - RNA, 2196 nt, synthetic construct
  misc_feature 1..2196: note = Description of Artificial Sequence: Synthetic polynucleotide
  source 1..2196: mol_type = other RNA
tccgggggctccagcggcgggtcctccggctccgagacccctggcacatctgagagcgccacccccgagtcctccggcggcagcagcggcggctctagcaccctgaacatcgaggacgagtacagactgcacgagacctccaaggagcccgacgtgtccctgggcagcacctggctgtccgacttcccccaggcctgggccgagaccggcggcatgggcctggcagtgaggcaggcccccctgatcatccccctgaaggccacaagcacccctgtgtccatcaagcagtaccccatgtcccaggaggccagactgggcatcaagcctcacatccagaggctgctggaccagggcatcctggtgccatgtcagtctccttggaacacccccctgctgcctgtgaagaagcccggcaccaacgactaccggccagtgcaggacctgcgggaggtgaacaagagggtggaggacatccaccctaccgtgcccaatccttacaacctgctgtccggcctgccccctagccaccagtggtacaccgtgctggatctgaaggacgccttcttctgcctgagactgcaccccacctctcagcccctgttcgccttcgagtggagggacccagagatgggcatctccggccagctgacctggaccagactgccccagggcttcaaaaactcccctaccctgttcaacgaggccctgcacagagacctggccgacttcaggatccagcaccccgacctgatcctgctgcagtacgtggacgatctgctgctggccgccaccagcgagctggactgccagcagggcacccgggccctgctgcagacactgggcaatctgggctacagggcctccgctaagaaggcccagatctgccagaagcaggtgaagtacctgggctacctgctgaaggagggccagagatggctgaccgaggcccggaaggagaccgtgatgggccagcccactccaaagacccccaggcagctgcgggagttcctgggcaaggccggcttctgccggctgttcatccccggcttcgccgagatggccgcccccctgtaccccctgaccaagcccggcaccctgttcaactggggccccgaccagcagaaggcctaccaggaaatcaagcaggccctgctgaccgcccctgccctgggcctgcccgatctgaccaagccattcgagctgttcgtggacgagaagcagggctacgccaagggcgtgctgacacagaagctgggaccctggcggaggcccgtggcctatctgtccaagaagctggatcccgtggccgccggctggcccccctgcctgcggatggtggccgccatcgccgtgctgaccaaggacgccggcaagctgaccatggggcagcctctggtgatcctggcccctcacgccgtggaggccctggtgaagcagccccccgacaggtggctgtccaatgccagaatgacccactaccaggccctgctgctggacaccgaccgggtgcagttcggccccgtggtggccctgaaccccgccacactgctgcccctgcctgaggagggcctgcagcacaactgcctggacatcctggccgaagcccacggcacccgccccgacctgaccgaccagcccctgccagacgccgaccacacctggtacaccgacggctccagcctgctgcaggagggccagaggaaggccggcgccgccgtgaccacagagacagaggtgatctgggccaaggccctgccagccggcactagcgcccagagggccgagctgatcgccctgacccaggccctgaagatggccgagggcaagaagctgaacgtgtacaccgactccaggtacgccttcgccaccgcccacatccacggcgagatctacagaaggagaggctggctgaccagcgagggcaaggagatcaagaacaaggatgagatcctggccctgctgaaggccctgttcctgcccaagagactgtccatcatccactgccctggccaccagaagggccactccgccgaggccaggggcaacagaatggccgaccaggccgccagaaaggccgccatcaccgagacccccgataccagcaccctgctgatcgagaactccagcccctccgggggcagcaagagaacagccgacggctccgagttcgagcccaagaagaagaggaaagtctaa

SEQ ID NO: 511 - RNA, 2196 nt, synthetic construct
  misc_feature 1..2196: note = Description of Artificial Sequence: Synthetic polynucleotide
  source 1..2196: mol_type = other RNA
tccggcggcagctctggcggcagctccggcagcgaaaccccaggcaccagcgagagcgctacccccgagagctccggcggctccagcggcggcagctcaacactgaacatcgaggacgagtatcggctgcacgagacaagcaaggagcccgacgtgagcctgggcagcacctggctgtccgacttccctcaggcctgggccgagaccggaggcatgggcctggccgtgcgccaggcccccctgatcatccccctgaaggccacctccacccccgtgtccatcaagcagtaccccatgtctcaggaggccaggctgggaatcaagccccacatccagagactgctggaccagggcatcctggtgccttgccagagcccctggaacacccctctgctgcccgtgaagaagcccggcaccaatgactaccggcccgtgcaggacctgagggaggtgaacaagcgggtggaggacattcaccccaccgtgcctaacccctacaacctgctgagcgggctgcccccctcccaccagtggtataccgtgctggacctgaaggacgccttcttctgcctgaggctgcaccccacatcccagcccctgttcgccttcgagtggagagaccccgagatgggcatcagcggccagctgacatggaccaggctgcctcagggcttcaagaacagccccaccctgttcaacgaggccctgcaccgcgacctggccgacttcagaattcagcaccctgacctgatcctgctgcagtacgtggacgacctgctgctggccgccaccagcgagctggattgccagcagggcaccagagccctgctgcagaccctgggcaacctgggctacagggccagcgccaagaaggcccagatctgccagaagcaggtgaagtacctgggctacctgctgaaggagggccagaggtggctgaccgaggccaggaaggagaccgtgatgggccagcccacccccaagactccccggcagctgagagagttcctgggcaaggccggcttctgccggctgtttatcccaggcttcgccgagatggccgcccccctgtaccccctgaccaagcctggcactctgttcaactggggcccagatcagcagaaggcctaccaggagattaagcaggccctgctgaccgcccccgccctgggcctgccagacctgaccaagccattcgagctgttcgtggacgaaaaacagggctacgccaagggcgtgctgacccagaagctgggcccctggcggagacctgtggcctacctgtccaagaagctggaccccgtggccgccggatggcccccctgcctgagaatggtggccgccatcgccgtgctgaccaaggacgccggcaagctgaccatgggacagccactggtgatcctggccccccacgcagtggaggccctggtgaagcagccccccgacaggtggctgagcaacgccagaatgacccactatcaggccctgctgctggacaccgacagagtgcagttcggccccgtggtggccctgaaccccgccacactgctgcccctgcccgaggagggcctgcagcacaactgcctggatattctggccgaggcccacggcacccgccccgacctgaccgaccagcccctgcccgacgccgaccacacctggtacaccgacggctccagcctgctgcaggagggccagaggaaggccggcgccgccgtgaccaccgagaccgaggtgatttgggccaaggccctgcccgccggcaccagcgcccagagagccgagctgatcgccctgacccaggccctgaagatggccgagggcaagaagctgaacgtgtacaccgactccagatacgccttcgccaccgcccacatccacggcgagatttaccggagaagaggctggctgaccagcgagggcaaggagatcaaaaacaaggacgagatcctggccctgctgaaggccctgttcctgccaaagcggctgtccatcatccactgtcccggccaccagaagggccactccgccgaggcccggggcaacaggatggccgatcaggccgccagaaaagccgccatcaccgagacccccgacacctccaccctgctgatcgagaatagctccccatccggcggcagcaagagaaccgccgacggcagcgagttcgagcccaagaagaagaggaaagtctaa

SEQ ID NO: 512 - RNA, 2196 nt, synthetic construct
  misc_feature 1..2196: note = Description of Artificial Sequence: Synthetic polynucleotide
  source 1..2196: mol_type = other RNA
tccggcggcagcagcggcggctctagcggcagcgagacccctggcaccagcgagagcgccacccccgagagctccggcggctcttccggcggctccagcaccctgaacatcgaggacgagtaccgcctgcacgaaacaagcaaggagccagacgtgtccctggggagcacctggctgtccgacttcccccaggcctgggccgagaccggaggcatgggactggccgtgcggcaggcccccctgatcatccccctgaaagccacctccaccccagtgtccatcaagcagtaccccatgtcccaggaggccaggctgggcatcaagccccacatccagaggctgctggaccagggcatcctggtgccttgccagagcccatggaatacccccctgctgcccgtgaagaagcccggcaccaacgattaccggcctgtgcaggacctgcgggaggtgaataagagagtggaggacatccaccccaccgtgcccaacccttacaacctgctgagcggcctgcccccaagccaccagtggtacaccgtgctggacctgaaggacgccttcttctgcctgcggctgcaccccacaagccagcctctgttcgcctttgagtggagagaccccgagatgggcatttccggccagctgacctggacccgcctgccacagggctttaagaatagccccacactgttcaacgaggccctgcacagggacctggccgacttccgcatccagcaccccgacctgatcctgctgcagtacgtggacgacctgctgctggccgccacctctgagctggactgccagcagggcaccagagccctgctgcagacactgggaaacctgggctacagggccagcgccaagaaggcccagatctgccagaagcaggtgaagtacctgggctacctgctgaaggagggccagagatggctgaccgaggccaggaaggagaccgtgatggggcagcctacccccaagacccctaggcagctgcgcgagttcctgggcaaggccggcttctgcaggctgttcatccccggcttcgccgagatggccgcccccctgtaccctctgaccaagcccggcaccctgttcaactggggccccgaccagcagaaggcctaccaggagatcaagcaggccctgctgaccgcccccgccctggggctgccagacctgaccaagcctttcgagctgttcgtggacgagaagcagggatacgccaagggcgtgctgacccagaagctgggcccatggaggcggcccgtggcctacctgagcaagaagctggaccccgtggccgccggctggcccccatgcctgcggatggtggccgccatcgccgtgctgaccaaggacgccggcaagctgaccatgggccagccactggtgatcctggcccctcacgccgtggaggccctggtgaagcagccacccgacagatggctgtccaacgccaggatgacccactaccaggccctgctgctggacaccgacagggtgcagttcggccctgtggtggccctgaaccccgccaccctgctgcccctgcccgaggagggcctgcagcacaactgcctggacatcctggccgaggcccacggcaccagacccgatctgaccgaccagcccctgcccgacgccgatcacacctggtacaccgatgggtctagcctgctgcaggaaggccagaggaaggccggcgccgccgtgacaaccgagaccgaggtgatctgggccaaggccctgcctgccggcaccagcgcccagcgggccgaactgatcgccctgacccaggccctgaagatggccgaggggaagaagctgaacgtgtacaccgactcccggtacgccttcgccaccgcccacatccacggcgagatctatagaaggcgcggctggctgacctccgagggcaaggaaatcaagaacaaggacgagatcctggccctgctgaaggccctgttcctgcctaagagactgagcatcatccactgcccaggccatcagaagggccacagcgcagaggcccgcggaaacagaatggccgaccaggccgccaggaaggccgccatcaccgagaccccagacaccagcaccctgctgatcgagaatagcagccccagcggcggcagcaagagaaccgccgatggcagcgagttcgagcccaagaagaagaggaaagtctaa

SEQ ID NO: 513 - RNA, 2196 nt, synthetic construct
  misc_feature 1..2196: note = Description of Artificial Sequence: Synthetic polynucleotide
  source 1..2196: mol_type = other RNA
tccggcggcagcagcggcggctcctccggcagcgagacccccggcaccagcgagagcgccacccccgagagcagcggcggctcctccggcggctcttccacactgaacatcgaggacgagtaccggctgcacgagacctccaaggagcccgacgtgagcctgggcagcacctggctgtccgactttccccaggcctgggccgagaccggcggcatgggcctggccgtgaggcaggcccccctgatcatcccactgaaggccaccagcacccccgtgagcatcaagcagtacccaatgagccaggaggcccggctgggcatcaagcctcacatccagcgcctgctggaccaggggatcctggtgccctgccagagcccctggaacacacccctgctgcccgtgaagaagcccggcaccaacgactaccggcccgtgcaggatctgagggaggtgaataagcgggtggaggacatccaccccaccgtgcccaacccttacaacctgctgagcggcctgccccccagccaccagtggtacacagtgctggatctgaaggacgccttcttttgtctgcggctgcaccccaccagccagcccctgttcgccttcgagtggagagacccagagatgggcatcagcggccagctgacctggaccaggctgcctcagggcttcaaaaatagccccaccctgttcaacgaggccctgcacagggacctggccgacttcaggatccagcaccccgacctgattctgctgcagtacgtggacgacctgctgctggccgccaccagcgagctggactgccagcagggcacccgggccctgctgcagactctgggcaacctgggctacagggcctctgccaagaaggcccagatctgccagaagcaggtgaagtacctgggctacctgctgaaggagggccagaggtggctgaccgaggccagaaaggagaccgtgatgggccagcccacccccaagacccctagacagctgagggagttcctgggcaaggcaggcttctgtaggctgttcatccccggatttgccgagatggccgcccccctgtaccccctgaccaagccaggcaccctgtttaactggggccccgaccagcagaaggcctaccaggagatcaagcaggccctgctgaccgcccccgccctgggcctgcctgatctgacaaagccattcgagctgttcgtggacgagaagcagggctacgccaagggcgtgctgacacagaagctgggcccctggaggcggcccgtggcctacctgtccaagaagctggaccccgtggccgccggctggcctccttgcctgaggatggtggccgctatcgccgtgctgaccaaggacgccgggaagctgaccatgggccagcccctggtgatcctggcccctcacgccgtggaggccctggtgaagcagcctcccgacagatggctgtccaacgccaggatgacccactaccaggccctgctgctggacaccgaccgggtgcagtttggccctgtggtggccctgaacccagccaccctgctgcccctgcccgaggaggggctgcagcacaactgtctggacatcctggccgaggcccacggcaccagacccgacctgaccgaccagcccctgccagacgccgaccacacctggtacaccgatggatctagcctgctgcaggagggccagaggaaggccggcgccgccgtgaccaccgagaccgaggtgatctgggccaaggccctgcctgccggcacctccgcccagcgcgccgagctgatcgccctgacccaggccctgaagatggccgagggaaagaagctgaatgtgtacaccgacagcaggtacgccttcgccaccgcccacatccacggggagatctacagacggagaggctggctgaccagcgaaggcaaggagatcaagaacaaggacgagatcctggccctgctgaaggccctgttcctgcccaagcggctgtccatcatccactgtcccggccaccagaagggccacagcgccgaggcccggggcaatagaatggccgaccaggccgccaggaaggccgccatcaccgagactcctgacaccagcaccctgctgatcgagaactccagccccagcggcggcagcaagaggaccgccgacggcagcgagttcgagcccaagaagaagaggaaagtctaa

SEQ ID NO: 514 - RNA, 2196 nt, synthetic construct
  misc_feature 1..2196: note = Description of Artificial Sequence: Synthetic polynucleotide
  source 1..2196: mol_type = other RNA
tccggcggcagcagcggcggctcttccggcagcgagaccccaggcacctccgagagcgccaccccagagtccagcggcggctccagcggcggcagctccaccctgaacatcgaggacgagtacaggctgcacgagaccagcaaggagccagacgtgagcctgggcagcacctggctgagcgatttcccccaggcctgggccgagactggcggcatgggcctggccgtgcggcaggcccccctgatcatcccactgaaggccacctccacccccgtgagcatcaagcagtaccccatgtcccaggaggcccggctgggcattaagccccacatccagcggctgctggaccagggcatcctggtgccctgccagtccccatggaacacccccctgctgcccgtgaagaagcccggcaccaacgattatagacccgtgcaggacctgagagaggtgaataagagagtggaggacatccaccctaccgtgccaaacccttacaacctgctgagcggcctgcccccctcccaccagtggtacaccgtgctggacctgaaggatgccttcttctgcctgagactgcaccccaccagccagcccctgtttgccttcgagtggagggaccccgagatgggcatcagcggccagctgacatggaccagactgcctcagggcttcaagaactcacccaccctgttcaacgaggccctgcacagagacctggccgactttagaatccagcaccccgatctgatcctgctgcagtacgtggacgacctgctgctggccgccaccagcgagctggactgccagcagggcacaagggccctgctgcagaccctgggcaacctgggctacagagccagcgccaagaaggcccagatctgccagaagcaggtgaaatacctgggctacctgctgaaagagggccagagatggctgaccgaggccaggaaggagaccgtgatgggccagcccaccccaaagacacctaggcagctgcgggagttcctgggcaaggccggcttctgcaggctgttcatccccggcttcgccgagatggccgccccactgtacccactgaccaagcctggcaccctgttcaactggggccccgatcagcagaaggcctaccaggagatcaagcaggccctgctgaccgcccccgccctgggcctgcccgacctgaccaagcccttcgaactgttcgtggacgagaagcagggctacgccaagggcgtgctgacccagaagctgggcccttggagacgcccagtggcctatctgtccaagaagctggatcccgtggccgctggatggcccccatgcctgcggatggtggccgccatcgccgtgctgaccaaggacgccggcaagctgaccatgggccagcccctggtgatcctggccccccacgccgtggaggccctggtgaagcagccacctgacaggtggctgagcaacgccagaatgacccactaccaggccctgctgctggataccgacagagtgcagttcggccctgtggtggccctgaaccccgccaccctgctgcctctgcccgaggagggcctgcagcacaactgcctggacattctggccgaggcccacggcaccaggcccgacctgaccgatcagccactgcccgacgccgaccacacctggtacaccgatggcagcagcctgctgcaggaaggccagcggaaggccggcgccgccgtgacaaccgagaccgaggtgatctgggccaaggccctgcctgccggaaccagcgcccagagggccgagctgatcgccctgacccaggccctgaagatggccgagggcaagaaactgaacgtgtacaccgacagcaggtacgccttcgccaccgcccacatccacggcgagatctacagaaggagaggctggctgactagcgagggcaaggagatcaagaacaaggacgagatcctggccctgctgaaggccctgttcctgccaaagagactgtccatcatccactgccctggccaccagaagggccactccgccgaggccagaggcaacaggatggccgaccaggccgccaggaaggccgccatcaccgagacaccagacaccagcaccctgctgatcgagaatagctccccctccggcggcagcaagaggactgccgacggcagcgagttcgagcccaagaagaagaggaaagtctaa

SEQ ID NO: 515 - RNA, 2196 nt, synthetic construct
  misc_feature 1..2196: note = Description of Artificial Sequence: Synthetic polynucleotide
  source 1..2196: mol_type = other RNA
agcggcggaagcagcgggggcagcagcggatctgagacccccggcacctccgagagcgccaccccagagtccagcggcggcagctccggcggcagcagcaccctgaacatcgaggacgagtacaggctgcacgagaccagcaaggagcccgacgtgtccctgggcagcacctggctgtccgacttcccccaggcctgggccgagaccggcggcatgggcctggccgtgcggcaggccccactgattattcctctgaaggccacaagcacccccgtgtctatcaagcagtacccaatgtcccaggaggccagactgggcatcaagccccacattcagcgcctgctggaccagggcatcctggtgccctgccagtctccctggaacacccccctgctgcccgtgaagaagcctgggaccaacgactacagacccgtgcaggacctgagggaggtgaacaagcgggtggaggacatccaccctaccgtgcccaacccctacaatctgctgagcggcctgccaccctcccaccagtggtacaccgtgctggacctgaaggacgccttcttctgcctgaggctgcaccccaccagccagccactgttcgccttcgagtggagagacccagagatgggcatcagcggccagctgacctggaccaggctgccccagggcttcaagaacagccccaccctgtttaacgaggccctgcacagagacctggccgacttccgcatccagcaccccgacctgatcctgctgcagtacgtggacgacctgctgctggccgccaccagcgagctggactgccagcagggcaccagagccctgctgcagacactgggcaatctgggctatcgcgccagcgccaagaaggcccagatctgccagaagcaggtgaagtacctgggctacctgctgaaggagggccagcggtggctgaccgaggcccggaaggagaccgtgatggggcagcctacacccaagacccctagacagctgcgcgagttcctgggaaaggccggcttctgcagactgttcatccctggcttcgccgagatggccgcccctctgtaccctctgactaagccaggcacactgttcaactggggccccgaccagcagaaggcctaccaggagatcaagcaggccctgctgaccgctcctgccctgggcctgcccgatctgaccaagcccttcgagctgttcgtggacgagaagcaggggtacgccaagggcgtgctgacccagaagctgggcccttggagacggcccgtggcctacctgagcaagaagctggatcccgtggccgccggctggcccccctgcctgaggatggtggccgccatcgccgtgctgaccaaggacgccggcaagctgaccatgggccagcccctggtgattctggccccccacgccgtggaggccctggtgaagcagccccctgacagatggctgtccaacgccaggatgacccattaccaggccctgctgctggacaccgaccgcgtgcagttcggccccgtggtggccctgaacccagccaccctgctgcccctgcccgaggagggcctgcagcacaattgcctggacatcctggccgaggcccacggcacccggcccgacctgaccgaccagcctctgcccgacgccgatcacacctggtacaccgacggcagcagcctgctgcaggagggccagaggaaggccggcgctgccgtgaccaccgagaccgaggtgatttgggccaaggccctgccagccggcaccagcgcccagagagccgagctgatcgccctcacccaggccctgaagatggccgagggcaagaagctgaacgtgtacaccgatagcaggtacgccttcgccaccgcccacatccacggcgagatctacaggaggagggggtggctgacctccgagggcaaggagatcaagaataaggacgagatcctggccctgctgaaggccctgtttctgcccaagagactgagcatcatccactgtcccggccaccagaagggccacagcgccgaggccaggggcaatcggatggccgatcaggccgcccggaaggccgccatcaccgagaccccagacacctctaccctgctgatcgagaactcctcccccagcggcggcagcaagagaaccgccgacggctccgagttcgagcccaagaagaagaggaaagtctaa

SEQ ID NO: 516 - RNA, 2196 nt, synthetic construct
  misc_feature 1..2196: note = Description of Artificial Sequence: Synthetic polynucleotide
  source 1..2196: mol_type = other RNA
agcggcggcagcagcggcggcagctccggcagcgagacccctggcaccagcgagagcgccacccccgagagctccggcggcagctctggcggcagcagcaccctgaacatcgaggacgagtacaggctgcacgagacctccaaggagcccgacgtgtctctgggctccacttggctgtccgatttcccccaggcctgggccgagaccggcggcatgggcctggccgtgcggcaggccccactgatcatccccctgaaagccacctccacacccgtgtccattaagcagtaccctatgtcccaggaggccaggctgggcatcaagccccacatacagagactgctggaccagggcatcctggtgccatgccagagcccttggaacacccccctgctgcctgtgaagaagcctggcaccaatgactaccgccccgtgcaggacctgagagaggtgaataagagggtggaggacatccaccctaccgtgcccaacccttacaatctgctgtccggcctgccccccagccaccagtggtacaccgtgctggacctgaaggacgccttcttctgcctgcggctgcaccccaccagccagcccctgttcgccttcgagtggagagaccccgagatgggcatctccggccagctgacctggaccaggctgcctcagggcttcaagaacagcccaaccctgttcaacgaggccctgcatagagacctcgccgactttcggatccagcacccagacctgatcctgctgcagtatgtggacgacctgctgctggccgccaccagcgagctggactgccagcagggcaccagggctctgctgcagaccctgggcaacctgggctaccgcgccagcgccaagaaggcccagatctgccagaagcaggtgaagtacctgggctacctgctgaaggagggccagcgctggctgaccgaggccagaaaggagaccgtgatgggccagcctacccccaagaccccccggcagctgcgggagtttctgggcaaggccggcttctgcaggctgttcattcctggcttcgccgagatggccgcccccctgtaccccctgaccaagcccggcaccctgttcaattggggccccgatcagcagaaggcctaccaggagatcaagcaggccctgctgaccgccccagccctgggtctgcccgacctgaccaagcctttcgagctgttcgtggacgagaagcagggctacgccaagggcgtgctgacccagaagctgggaccctggcggagacccgtggcctacctgtctaaaaagctggacccagtggccgccggctggcccccttgcctgcgcatggtggccgccatcgccgtgctgaccaaagacgccggcaagctgaccatgggccagcccctggtgatcctggcccctcacgccgtggaggccctggtgaagcagccacccgacaggtggctgtccaacgcccgcatgacccactatcaggccctgctgctggacaccgacagagtgcagttcggccccgtggtggccctgaaccccgccaccctgctgcccctgcccgaggagggcctgcagcacaactgcctggacatcctggccgaggcccacggcacccgccctgacctgaccgaccagcccctgccagacgccgaccacacctggtacaccgacggcagctccctgctgcaggagggccagcggaaggccggcgccgccgtgaccaccgagaccgaggtgatctgggccaaggccctgccagccggcaccagcgcccagagagccgagctgatcgccctgacccaggccctgaagatggccgagggcaagaagctgaacgtgtacaccgacagcagatacgccttcgccacagcccacatccacggcgagatctacagaaggagaggctggctgaccagcgagggcaaggagatcaagaataaggacgagatcctggccctgctgaaggccctgttcctgcctaagcggctgagcatcatccactgccccggccaccagaagggccacagcgccgaggccaggggcaacagaatggccgaccaggccgccaggaaggccgccatcaccgagaccccagatacctccaccctgctgatcgagaacagctcccccagcggcggctccaagagaaccgccgacggcagcgagttcgagcccaagaagaagaggaaagtctaa

SEQ ID NO: 517 - RNA, 2196 nt, synthetic construct
  misc_feature 1..2196: note = Description of Artificial Sequence: Synthetic polynucleotide
  source 1..2196: mol_type = other RNA
agcggcggcagctccggcggctccagcggcagcgagacccccggcaccagcgagagcgccacccccgagagcagcggcggcagcagcggcggctcctccaccctgaacatcgaggacgagtaccggctgcacgagaccagcaaggagcccgacgtgtccctgggcagcacctggctgtccgacttccctcaggcctgggccgagaccggcggcatgggcctggctgtgaggcaggcccccctgatcatccccctgaaggccacatccacacccgtgtccatcaagcagtaccctatgtctcaggaggccagactgggcattaaaccccacatccagaggctgctggaccagggcatcctggtgccctgccagtctccctggaatacccctctgctgcccgtgaagaagcctggcaccaacgactacagacccgtgcaggacctgcgcgaggtgaacaagagagtggaggacatccacccaaccgtgccaaacccatataacctgctgtctggcctgccaccttcccaccagtggtacaccgtgctggacctgaaagacgccttcttctgcctgcggctccaccccacctcccagcccctgttcgccttcgagtggagggacccagagatgggcatcagcggccagctgacctggacccggctgcctcagggcttcaagaactcccccaccctgtttaacgaagccctgcacagggatctggccgactttagaatccagcaccccgatctgatcctgctgcagtacgtggacgacctgctgctggccgccaccagcgaactggattgccagcagggcaccagagccctgctgcagaccctgggcaacctggggtacagggccagcgccaagaaggcccagatctgccagaagcaggtgaagtacctgggctacctgctgaaggagggccagagatggctgaccgaggccagaaaagagacagtgatgggccagcccacacccaagaccccaagacagctgcgcgagttcctgggcaaggccggcttctgccggctgttcatccctggattcgccgagatggccgcccccctgtaccccctgaccaagcccggcaccctgttcaactggggccccgaccagcagaaggcctaccaggagatcaagcaggccctgctgaccgcccccgccctgggcctgcccgacctgacaaagcctttcgagctgttcgtggacgagaagcagggctacgccaagggcgtgctgacccagaagctgggcccatggcggaggcccgtggcctacctgtccaagaagctggaccccgtggccgccggctggcccccctgcctgaggatggtggccgccatcgccgtgctgaccaaggacgccggaaagctgaccatgggccagccactggtgatcctggccccccacgccgtggaggccctggtgaagcagccccccgaccggtggctgtccaatgccaggatgacccactaccaggccctgctgctggacaccgacagagtgcagttcggccccgtggtggccctgaaccccgccaccctgctgcctctgcccgaggagggcctgcagcacaactgcctggacatcctggccgaggcccacggcaccaggcccgacctgacagaccagcccctgcccgacgccgaccacacctggtacaccgatggcagctccctgctgcaggagggccagagaaaggccggcgccgccgtgacaaccgagaccgaggtgatctgggccaaggccctgcccgccggcacctccgcccagcgggccgagctgatcgccctgacccaggccctgaagatggccgagggcaagaagctgaacgtgtacaccgacagccggtacgccttcgccaccgcccacatccacggcgagatctaccggcggaggggctggctgacctccgagggcaaggagatcaagaacaaggacgagatcctggccctgctgaaggccctgttcctgcccaagaggctgtccatcatccactgtccaggccaccagaagggccattccgccgaggccaggggcaacaggatggccgaccaggccgccagaaaggccgccatcacagagacccccgacacctctacactgctgatcgagaacagtagccctagcggcggaagcaagagaaccgccgacggcagcgagttcgagcccaagaagaagaggaaagtctaa

SEQ ID NO: 518 - RNA, 2196 nt, synthetic construct
  misc_feature 1..2196: note = Description of Artificial Sequence: Synthetic polynucleotide
  source 1..2196: mol_type = other RNA
agcggcggcagcagcggcggcagcagcggcagcgagacccccggcacctccgagagcgccacccccgagagcagcgggggctccagcggcggcagctctaccctgaacatcgaggacgagtaccgcctgcacgagaccagcaaggagcccgacgtgagcctgggcagcacctggctgtccgactttccccaggcctgggccgagaccggaggcatgggcctggccgtgcggcaggccccactgatcatccctctgaaggccaccagcacccctgtgagcatcaagcagtaccccatgtctcaggaggccaggctgggcattaagccacacatccagcggctgctggatcagggcatcctggtgccatgccagtccccctggaacacccctctgctgcccgtgaagaagcccggcaccaacgactacagacccgtgcaggacctgagagaggtgaacaagagggtggaggacatccaccccaccgtgcccaacccctacaacctgctgtccggcctgccccctagccaccagtggtacaccgtgctggacctgaaggacgccttcttctgcctgcgcctgcaccccaccagccagccactgttcgccttcgagtggagagaccccgagatggggattagcgggcagctgacctggaccagactgcctcagggcttcaaaaacagccccaccctgttcaacgaggccctgcacagggacctggccgacttcagaatccagcaccccgacctgatcctgctgcagtacgtggacgacctgctgctggctgccaccagcgagctggactgccagcagggcaccagggccctgctgcagaccctgggcaatctgggctaccgggccagcgccaagaaagcccagatctgccagaagcaggtgaagtacctgggctacctgctgaaagagggccagagatggctgaccgaggcccggaaggagaccgtgatgggccagcccacacccaagaccccaaggcagctgagggagtttctgggcaaggccggcttttgcagactgtttatccccgggttcgccgagatggccgcccccctgtaccccctgacaaagccaggcaccctgttcaactggggccccgaccagcagaaggcctaccaggagatcaagcaggccctgctgaccgcccctgccctgggcctgcccgacctgaccaagcccttcgagctgttcgtggacgagaagcagggctacgccaagggcgtgctgacccagaagctgggcccctggcggagacccgtggcctacctgtctaaaaagctggacccagtggccgccggctggccaccatgcctgagaatggtggccgccatcgccgtgctgaccaaggatgccggcaagctgaccatgggccagccactggtgatcctggccccacacgccgtggaggccctggtgaagcagccccccgacaggtggctgtccaatgccaggatgacccactaccaggccctgctgctggacaccgatagggtgcagttcggccccgtggtggccctgaaccctgccaccctgctgcccctgcccgaggagggcctgcagcacaactgcctggacatcctggccgaggcccacggcacaaggcccgacctgacagaccagcccctgcccgacgccgaccacacctggtacaccgacggctcctctctgctgcaggagggccagagaaaggccggcgccgcagtgaccaccgagaccgaggtgatctgggccaaggccctgcctgccggcaccagcgcccagcgggccgaactgatcgccctgacccaggccctgaagatggccgagggcaaaaagctgaacgtgtataccgattctaggtatgccttcgccaccgcccatatccacggcgagatctacagaagaagaggctggctgaccagcgagggcaaggagatcaagaataaggacgagatcctggccctgctgaaggccctgttcctgccaaagaggctgagcatcatccactgtcccggccaccagaagggccacagcgccgaggccaggggcaacagaatggccgaccaggccgccaggaaggccgccatcaccgagacccccgacacctccaccctgctgatcgagaacagctccccctctggcggcagcaagaggaccgccgacggcagcgagttcgagcccaagaagaagaggaaagtctaa

SEQ ID NO: 519 - RNA, 2196 nt, synthetic construct
  misc_feature 1..2196: note = Description of Artificial Sequence: Synthetic polynucleotide
  source 1..2196: mol_type = other RNA
tccggcggctccagcggcggcagcagcggcagcgagacccccggcaccagcgagagcgccaccccagagagctccggcggcagcagcggcggcagcagcaccctgaacatcgaggacgagtacaggctgcacgagaccagcaaggagcccgacgtgagcctgggcagcacctggctgagcgatttccctcaggcttgggccgagaccggcggcatgggcctggccgtgcggcaggcccccctgattatccccctgaaggccaccagcacccccgtgagcatcaagcagtacccaatgtcccaggaggccaggctgggcatcaagcctcacatccagaggctgctggaccagggcatcctggtgccatgccagtccccctggaacacccctctgctgcccgtgaagaagcctggcaccaacgactaccggcccgtgcaggacctgagagaagtgaacaagcgggtggaggacatccacccaaccgtgcccaacccttacaacctgctgtccggcctgccccccagccaccagtggtacaccgtgctggacctgaaggacgccttcttctgcctgagactgcaccccacctctcagcccctgttcgccttcgagtggcgcgaccccgagatgggcatcagcggccagctgacctggaccagactgccacagggctttaagaatagcccaaccctgtttaacgaggccctgcacagggacctggccgacttcaggatccagcaccccgacctgattctgctgcagtacgtggacgacctgctgctggccgctaccagcgagctggactgccagcagggcaccagagccctgctgcagaccctgggcaacctgggctacagagccagcgccaagaaggcccagatctgtcagaagcaggtgaagtatctgggctacctgctgaaggaaggccagagatggctgaccgaggccagaaaggagactgtgatgggccagcccacccccaagacccccaggcagctgcgggagttcctgggcaaggccggcttttgcagactgtttatccctggcttcgccgagatggccgccccactgtaccctctgaccaagcctggcaccctgtttaactggggccccgaccagcagaaggcctaccaggagatcaagcaggccctgctgaccgcccccgccctgggcctgcccgacctgaccaagcctttcgagctgttcgtggacgagaagcagggatacgccaaaggcgtgctgacccagaagctgggcccctggcggaggcccgtggcctacctgagcaaaaaactggaccctgtggccgccggctggcccccatgcctgcggatggtggccgccatcgctgtgctgaccaaggacgccggcaagctgaccatgggccagcccctggtgatcctggcccctcacgccgtggaggctctggtgaagcagcctccagacaggtggctgtccaacgccaggatgacccactaccaggccctgctgctggacaccgaccgggtgcagttcggccctgtggtggccctgaaccccgccaccctgctgcctctgccagaggagggcctgcagcacaactgcctggacatcctggccgaggcccacggcaccaggcccgacctgaccgaccagcccctgcctgacgccgaccacacctggtacaccgacggcagctccctgctgcaggagggccagaggaaggccggcgccgccgtgaccaccgagaccgaggtgatctgggccaaagccctgcctgccggcacctccgcccagcgggccgagctgatcgccctgacccaggccctgaagatggctgagggcaagaagctgaacgtgtacaccgattccagatacgccttcgccaccgcccacatccacggcgagatctacagaagaaggggctggctgacctccgagggcaaggagatcaagaacaaggacgagattctggccctgctgaaggccctgttcctgcctaagagactgagcatcatccactgtcccggccaccagaagggccacagcgccgaggccagaggcaatagaatggccgaccaggccgccagaaaggccgccatcaccgagacccccgacaccagcaccctgctgatcgagaacagcagccccagcggcggctccaaacgcaccgccgacgggagcgagttcgagcccaagaagaagaggaaagtctaa

SEQ ID NO: 520 - RNA, 2196 nt, synthetic construct
  misc_feature 1..2196: note = Description of Artificial Sequence: Synthetic polynucleotide
  source 1..2196: mol_type = other RNA
tctggcggcagctctggcggttccagcgggtccgagacccctggaaccagcgagagcgccacccccgagagcagcggcggcagctccgggggctccagcaccctgaacatcgaggacgagtacaggctgcacgagaccagcaaggagcctgacgtgagtctgggcagcacctggctgtccgacttccctcaggcttgggccgagaccggggggatgggcctggccgtgcgccaggcccccctgatcatccccctgaaggccacctccaccccggtgagcatcaagcagtaccccatgtcccaggaggcccggctgggcatcaagccccacatccagcggctgctggatcaggggatcctggtgccctgccagagcccctggaacaccccactgctgcctgtgaagaagccaggcaccaacgactatcggcccgtgcaggacctgcgggaggtgaataagagggtggaggacatccaccctaccgtgcccaacccttacaacctcctgtcaggcctgccacccagccatcagtggtacaccgtgctggacctgaaggatgccttcttctgcctgcggctgcaccccaccagccagcccctgttcgccttcgagtggagagacccagagatggggatctccgggcagctgacctggacccggctgccccagggcttcaagaacagccccaccctgttcaatgaggccctgcacagggacctggcagacttcaggatccagcaccctgacctgatcctgctgcagtacgtggacgacctgctgctggcagccacctctgagctggactgccagcagggcaccagagccctgctgcagaccctgggcaacctgggctacagggcctccgccaagaaggcccagatctgccagaagcaggtgaagtacctgggctatctgctgaaggagggccagaggtggctgaccgaggccaggaaggagacagtgatggggcagccaacccccaagacccccaggcagctgagggagtttctggggaaggccggcttctgccggctgttcatccccggcttcgccgagatggctgccccactgtatcccctgaccaagcctggcaccctgttcaattgggggccagaccagcagaaggcttatcaggagatcaagcaggccctgctgaccgccccagccctgggcctgcctgacctgactaagcctttcgagctgtttgtggacgagaagcagggctacgccaagggcgtgctgacccagaagctgggcccttggcggaggcccgtggcctacctgtccaagaagctggaccccgtggcagccggctggcctccttgtctgcgcatggtggccgccatcgctgtgctgaccaaggacgccggcaagctgaccatgggccagcctctggtcatcctggccccacacgccgtggaggccctggtgaagcagccacctgacaggtggctgtccaacgccaggatgacccactaccaggccctgcttctcgacacagacagggtgcagttcggccccgtggtggccctgaaccccgccactctgctgcccctccccgaggaggggctgcagcacaactgtctggacattctggccgaggcccacggcactcggccagacctgacagaccagcccctgcccgacgccgaccacacctggtacaccgacggcagcagcctgctgcaggagggccagcggaaggccggggccgccgtgaccaccgagaccgaggtgatctgggccaaggccctgcccgccggcacctccgcccagagggccgagctgatcgccctgacccaggccctgaagatggccgagggcaagaagctgaacgtgtataccgacagccgctacgccttcgccaccgcccacatccacggcgagatctacaggcgcaggggctggctgaccagcgagggcaaggagatcaagaacaaggatgagatcctggccctgctgaaggccctgttcctgcccaagcggctgtccattatacactgccccggccatcagaagggccactctgctgaggcccgggggaatcggatggccgaccaggccgccaggaaggccgccatcaccgagacccccgacaccagcaccctgctgatcgagaactcctcccccagcggcggctccaagcggaccgccgacgggagcgagttcgagcccaagaagaagaggaaagtctaa

SEQ ID NO: 521-522 - skipped (2 entries)

SEQ ID NO: 523 - RNA, 2196 nt, synthetic construct
  misc_feature 1..2196: note = Description of Artificial Sequence: Synthetic polynucleotide
  source 1..2196: mol_type = other RNA
agcggcgggagctctggtggcagctctgggagcgagactcctggcaccagcgagtccgccaccccagagagctctgggggaagctcaggcggctccagcaccctgaacatcgaggacgagtacaggctgcacgagaccagcaaggagcccgacgtgagtctgggctccacctggctgtctgacttcccccaggcctgggccgagaccggggggatgggcctggccgtgcgccaggcccccctgatcatccccctgaaggccaccagcactcccgtgagcatcaagcagtaccctatgagccaggaggccaggctgggcatcaagccccacatccagaggctgctggaccagggcatcctggtgccctgccagagcccctggaacaccccactgctgccagtgaagaagcctggcaccaacgactacaggcctgtgcaggacctgagggaggtgaacaagagggtggaggacatccaccctactgtgcctaacccttacaacctgctgtccggcctgcctcctagccaccagtggtacaccgtgctggacctgaaggacgccttcttctgtctgcggctgcatcccacatctcagcctctgttcgccttcgaatggagggaccctgagatggggatcagcggccagctgacctggaccaggctccctcagggcttcaagaacagccccaccctgttcaatgaggccctgcacagggacctggccgacttcaggatccagcaccccgacctcatcctgctgcagtacgtggacgacctgctgctggccgctaccagcgagctggactgccagcagggcaccagagccctgctgcagaccctgggaaatctgggctatcgggccagcgccaagaaggcccagatttgccagaagcaggtgaagtacctgggctacctgctgaaggagggacagaggtggctgaccgaggccaggaaggagaccgtgatgggccagcctaccccaaagactccccggcagctgcgggagtttctggggaaggctggcttctgccggctcttcattcctggcttcgccgagatggcagcccctctgtaccctctgaccaagccaggcaccctgttcaactggggcccagaccagcagaaggcctatcaggagatcaagcaggccctgctgaccgccccagccctgggcctgcctgacctgaccaagcccttcgagctgtttgtggacgagaagcagggctacgccaagggcgtgctgacccagaagctgggcccttggcggaggcccgtggcctacctgtccaagaagctggaccccgtggccgccggctggccaccatgcctgcgcatggtggccgccatcgccgtgctgaccaaggacgccgggaagctgaccatgggtcagcccctggtgatcctggctccgcacgccgtggaggccctggtgaagcagccaccagaccggtggctgtccaacgccaggatgacccactaccaggccctgcttctcgacacagacagggtgcagttcggcccagtggtggccctgaaccccgccaccctgctgcctctgccagaggagggcctgcagcacaactgcctggacattctggcagaggcccacggcacccggcctgacctgaccgaccagcccctgcccgacgctgaccacacctggtacaccgacggcagcagcctgctgcaggagggtcagaggaaggccggggccgccgtgaccaccgagaccgaggtgatctgggccaaggccctgcccgcagggacctccgcccagagggccgagctgatcgccctgacccaggccctgaagatggccgagggcaagaagctgaacgtgtacaccgacagccggtacgccttcgccaccgcccacatccacggcgagatctacaggcgcaggggctggctgaccagcgagggcaaggagatcaagaacaaggacgagatcctggccctgctgaaggccctgttcctgcccaagcgcctgtccatcatccactgccccggccatcagaagggccacagcgccgaggccaggggtaacaggatggccgaccaggccgccaggaaggccgccatcactgagacccctgacaccagcaccctgctgatcgagaactcctcccccagcggcggctccaagcggaccgccgacgggagcgagttcgagcccaagaagaagaggaaagtctaa

SEQ ID NO: 524 - RNA, 2196 nt, synthetic construct
  misc_feature 1..2196: note = Description of Artificial Sequence: Synthetic polynucleotide
  source 1..2196: mol_type = other RNA
agcggggggtccagcggcggcagcagcggcagcgagacccccggcaccagcgagagcgccacccccgagtctagcggcggctccagcggcggcagctccaccctgaacatcgaggacgagtaccgcctgcacgagaccagcaaggagcccgacgtgagtctgggctccacctggctgagcgactttcctcaggcctgggccgagaccgggggcatgggcctggctgtgcggcaggcccctctgatcatcccactgaaggccaccagcaccccagtgagcatcaagcagtaccccatgtcccaggaggcccggctgggcatcaagccccacatccagcggctgctggatcaggggatcctggtgccctgccagagcccctggaacacccccctgctgcctgtgaagaagccaggcaccaacgactaccgccccgtgcaggacctgcgcgaggtgaacaagagggtggaggacatccaccctaccgtgcctaatccttacaacctgctgagcggcctgccacccagccatcagtggtacacggtgctggacctgaaggatgcctttttctgtctgcggctgcaccccaccagccagccactgttcgccttcgagtggcgggatcccgagatggggatctccgggcagctgacctggacccggctgccccagggcttcaagaacagccccacgctgttcaatgaggccctgcacagagacctggcagacttcaggatccagcaccctgacctgatcctgctgcagtacgtggacgatctgctgctggccgccaccagcgagctggactgccagcagggcaccagagccctgctgcagaccctgggaaatctgggctatcgggccagcgccaagaaggcccagatttgccagaagcaggtgaagtacctgggctacctgctgaaggaggggcagcgctggctcaccgaggctcggaaggagaccgtgatgggccagcctacccctaagacccccaggcagctgagggagttcctggggaaggccggcttctgcagactgttcatccccggcttcgccgagatggccgccccactgtaccccctgaccaagcctggcaccctgttcaactggggccccgaccagcagaaggcttatcaggagatcaagcaggccctgctgaccgccccagccctgggcctgcctgacctgactaagcctttcgagctgttcgtggacgagaagcagggctacgccaagggcgtgctgacccagaagctgggcccttggcggcgcccggtggcctacctgtccaagaagctggaccccgtggccgccgggtggcctccatgcctgcggatggtggccgccatcgccgtgctgaccaaggacgctggcaagctgaccatgggccagccactggtgatcctggccccacacgccgtggaggccctggtgaagcagccaccagacaggtggctgtccaacgccaggatgacccactaccaggccctgctgctcgacaccgacagggtgcagttcggccccgtggtggccctgaaccccgccaccctgctgcccctgcccgaggagggcctgcagcacaactgcctggacatcctggcagaggcccacggcaccaggcccgacctgaccgaccagcctctgccagatgccgaccacacctggtacaccgacggcagttccctgctgcaggaggggcagcggaaggccggggccgccgtgaccaccgagaccgaggtgatctgggccaaggccctgcctgccggcacctccgcccagagggccgagctgatcgccctgacccaggccctgaagatggccgagggcaagaagctgaacgtgtacactgacagcaggtacgccttcgccaccgcccacatccacggcgagatctacaggaggaggggctggctgaccagcgagggcaaggagatcaagaacaaggacgagatcctggccctgctgaaggccctgttcctccccaagaggctgagcatcatccactgccccggccatcagaagggccacagcgccgaggccaggggcaatcggatggccgaccaggccgccagaaaggccgccatcaccgagacccctgacacctccaccctgctcatcgagaacagctcccccagcggcgggagcaagcgcaccgccgacgggagcgagttcgagcccaagaagaagaggaaagtctaa

SEQ ID NO: 525 - RNA, 2196 nt, synthetic construct
  misc_feature 1..2196: note = Description of Artificial Sequence: Synthetic polynucleotide
  source 1..2196: mol_type = other RNA
tctgggggaagcagcggcggcagcagcggctcagagacaccgggcaccagcgagtctgccacccccgagagctccggcgggagctccggggggagcagcaccctgaacatcgaggacgagtacaggctgcacgagaccagcaaggagcccgacgtgtctctgggcagcacctggctgtccgacttcccccaggcctgggccgagacaggcggcatgggcctggccgtgcgccaggcccccctgatcatccccctgaaggccaccagcacccctgtgtccatcaagcagtaccccatgtcccaggaggctcggctgggcatcaagccccacatccagcggctgctggatcaggggatcctggtgccctgccagagcccctggaacaccccactgctgcctgtgaagaagccaggcaccaacgactacaggcccgtgcaggacctcagggaggtgaacaagagggtggaggacatccaccctaccgtgcccaacccctacaacctgctgtcaggtctgccccccagccaccagtggtacaccgtgctggacctgaaggatgcctttttctgcctgcggctgcaccccaccagccagccactgttcgccttcgagtggcgcgacccagagatgggcatcagcggccagctgacctggacccggctgccccagggcttcaagaacagccccaccctgttcaatgaggccctgcaccgggacctggccgacttcaggatccagcacccagacctgatcctgctgcagtatgtggacgacctgctgctggccgccaccagcgagctggactgccagcagggcaccagagccctgctgcagaccctgggcaatctggggtacagggcctccgccaagaaggcccagatctgccagaagcaggtgaagtatctgggctatctgctgaaggagggccagcggtggctcaccgaggccaggaaggagaccgtcatgggccagcctaccccaaagacccccaggcagctgagggagtttctggggaaggctggcttctgtcggctgttcattcctggcttcgctgagatggccgcccccctgtaccccctgaccaagcccgggaccctgttcaactggggccccgaccagcagaaggcctatcaggagatcaagcaggccctgctgaccgccccagccctgggcctgcctgacctgaccaagcccttcgagctgttcgtggacgagaagcagggctacgccaagggcgtgctgacccagaagctgggcccttggcggaggcccgtggcctacctgagcaagaagctggaccccgtggcagccggctggcctccttgcctgaggatggtggccgccatcgccgtcctcaccaaggacgccggcaagctgaccatgggccagcctctggtcatcctggccccacacgccgtggaggccctggtgaagcagccacctgacaggtggctgtccaacgccaggatgacccactaccaggccctgctgctggacaccgacagggtgcagttcggccctgtggtggccctgaaccccgccacactgctgcctctgcccgaggaggggctgcagcacaactgtctggacattctggccgaggcccacggcactcggccagacctgacagaccagcccctccccgacgccgaccacacctggtacacagacggcagcagcctgctgcaggagggccagcggaaggccggggccgccgtgaccaccgagaccgaggtgatctgggccaaggccctgcccgctggcacctccgcccagcgggccgagctgatcgccctgacccaggccctgaagatggccgagggcaagaagctgaatgtgtacaccgacagccgctacgccttcgccaccgcccacatccacggcgagatctacaggaggaggggctggctgaccagcgagggcaaggagatcaagaacaaggatgagatcctggccctgctgaaggccctgttcctccccaagcggctgtccatcattcattgccccggccatcagaagggccacagtgccgaggcccgggggaatcggatggccgaccaggccgccaggaaggccgccatcaccgagacccccgacaccagcaccctgctgatcgagaactcctcccccagcggcggctccaagaggaccgccgacgggagcgagttcgagcccaagaagaagaggaaagtctaa

SEQ ID NO: 526 - RNA, 2196 nt, synthetic construct
  misc_feature 1..2196: note = Description of Artificial Sequence: Synthetic polynucleotide
  source 1..2196: mol_type = other RNA
tcagggggatccagcgggggctcctccggctctgagactcccgggactagcgagagcgctactcccgagagctcagggggaagctccggcggctccagcaccctgaacatcgaggacgagtacaggctgcacgagaccagcaaggagcccgacgtgagtctgggctccacctggctgtccgacttcccccaggcctgggccgagaccggcggcatgggcctggccgtgaggcaggcccccctgatcatccccctgaaggccaccagcaccccggtgtccatcaagcagtaccccatgtcccaggaggccaggctgggcatcaagccccacatccagcggctgctggaccaggggatcctggtgccctgccagagcccctggaacacccccctgctgcctgtgaagaagccaggcaccaacgactacaggcctgtgcaggatctgcgcgaggtgaacaagagggtggaggacatccaccccaccgtgccaaatccttacaacctgctgtccggcctgcctccttcacaccagtggtacaccgtgctggacctgaaggacgccttcttctgcctgagactgcaccccacctctcagcctctgttcgccttcgaatggagggaccctgagatggggatctcaggccagctgacctggacccggctgccccagggcttcaagaacagccccaccctgttcaatgaggccctgcaccgggacctggccgacttcagaatccagcacccagatctgatcctgctgcagtacgtggacgacctgctgctggccgccaccagcgagctggactgccagcagggcaccagagccctgctgcagaccctggggaatctgggctatcgggccagcgccaagaaggcccagatttgccagaagcaggtgaagtatctgggctacctgctgaaggagggccagaggtggctgaccgaggccaggaaggagacagtgatggggcagccaacccccaagacccccaggcagctgcgggagtttctggggaaggccggcttctgccggctgttcatccccggcttcgccgagatggctgccccactgtaccctctgaccaagcccggcaccctgttcaactggggccccgaccagcagaaggcctaccaggagatcaagcaggccctgctgaccgccccagccctgggcctgcctgatctgaccaagcccttcgagctgttcgtggacgagaagcaggggtacgccaagggcgtgctgacccagaagctgggcccctggcggcggccggtggcctacctgtccaagaagctggaccccgtggccgccggctggccaccctgtctgcggatggtggctgctatcgccgtgctgaccaaggacgccgggaagctgaccatgggtcagcccctggtgatcctggccccacacgccgtggaggccctggtgaagcagccaccagacaggtggctgagcaacgccaggatgacccactaccaggccctgcttctggacaccgacagggtgcagttcggccccgtggtggccctgaaccccgccactctgctgcccctgcccgaggagggcctgcagcacaactgcctggacatcctggcagaggcccacggcaccaggcccgacctgaccgaccagcctctgccagatgccgaccacacctggtacaccgacggcagttccctgctgcaggaggggcagcggaaggccggggccgccgtgaccaccgagaccgaggtgatctgggccaaggccctgcccgcagggacctccgcccagagggccgagctgatcgccctgacccaggccctgaagatggccgagggcaagaagctgaacgtgtacacagacagccgctacgccttcgccaccgcccacatccacggcgagatctacaggcgcaggggctggctgaccagcgagggcaaggagatcaagaacaaggatgagatccttgccctgctgaaggccctgttcctgcccaagcggctgtctatcatccactgccccggccatcagaagggccacagtgctgaggctcgggggaacaggatggccgaccaggccgccaggaaggccgccatcactgagacccccgacaccagcaccctgctgatcgagaacagcagccctagcggcggctccaagaggaccgccgacgggagcgagttcgagcccaagaagaagaggaaagtctaa

SEQ ID NO: 527 - RNA, 2196 nt, synthetic construct
  misc_feature 1..2196: note = Description of Artificial Sequence: Synthetic polynucleotide
  source 1..2196: mol_type = other RNA
tccggcggctccagcggcggcagctccgggtccgagacccctgggaccagcgagtctgccacccctgagagctccggcggctcctctgggggaagcagcaccctgaacatcgaggacgagtacaggctccacgagaccagcaaggagcctgacgtgtccctgggcagcacctggctgtccgacttcccccaggcctgggccgagaccgggggcatgggcctggccgtgcgccaggcccccctgatcatcccactgaaggccaccagcacccccgtgtccatcaagcagtaccccatgtcccaggaggccaggctgggcatcaagccccacatccagcgcctgctggatcaggggatcctggtgccctgccagagcccctggaacacccccctgctgccggtgaagaagcccggcaccaacgactacaggcccgtgcaggacctgagggaggtgaacaagagggtggaggacatccaccctactgtgcccaatccctacaacctgctgagcggcctgccccccagccatcagtggtacaccgtgctggacctgaaggatgccttcttctgcctgaggctgcatcccaccagccagcccctgttcgccttcgagtggagagacccagagatggggatctccgggcagctgacctggacccggctgccccagggcttcaagaacagccccaccctgttcaacgaggccctgcacagggacctggctgacttcaggatccagcaccccgacctgatcctgctgcagtacgtggatgacctgctgctggcagccaccagcgagctggactgccagcagggcacccgcgccctgctgcagaccctggggaatctgggctatcgggccagcgccaagaaggcccagatttgccagaagcaggtcaagtacctgggctacctgctgaaggaggggcagcggtggctgaccgaggcacggaaggagaccgtgatgggtcagcccacccccaagacccccaggcagctgcgggagtttctcggcaaggccgggttctgcaggctgttcatccccggctttgccgagatggctgcccctctgtaccccctgaccaagccagggaccctgttcaactggggcccagaccagcagaaggcctatcaggagatcaagcaggccctgctgaccgccccagccctgggcctgcctgacctgaccaagcccttcgagctgtttgtggacgagaagcagggctacgccaagggcgtgctgacccagaagctgggcccttggcggaggcctgtggcctacctgagcaagaagctggaccccgtggcagccggctggcctccttgcctgaggatggtggccgccatcgccgtcctcaccaaggacgccggcaagctgaccatgggccagcctctggtgatcctggccccacacgccgtggaggccctggtgaagcagccacctgacaggtggctgtccaacgccaggatgacccactaccaggccctgcttctcgacacagacagggtgcagttcggccccgtggtggccctgaaccccgccaccctgctgcccctccccgaggaggggctgcagcacaactgtctggacatcctggcagaggcccacggcaccaggcccgacctgaccgaccagcctctgccagatgccgaccacacctggtacacggacggctccagcctgctgcaggagggccagcggaaggctggagccgccgtgaccaccgagacagaggtgatctgggccaaggccctgcccgcagggacctccgcccagagggccgagctgatcgccctgacccaggccctgaagatggccgagggcaagaagctgaacgtgtacaccgacagccggtacgccttcgccaccgcccacatccacggcgagatctacaggcggcggggatggctgaccagcgagggcaaggagatcaagaacaaggacgagatcctggccctgctgaaggccctgttcctgcccaagcgcctgtccatcatccactgccccggccatcagaagggccactctgctgaggcccgggggaatcggatggccgaccaggccgcccggaaggccgccatcaccgagacccccgacaccagcaccctgctgatcgagaacagcagccccagcggcggctccaagcggaccgccgacggctctgagttcgagcccaagaagaagaggaaagtctaa

SEQ ID NO: 528 - RNA, 2196 nt, synthetic construct
  misc_feature 1..2196: note = Description of Artificial Sequence: Synthetic polynucleotide
  source 1..2196: mol_type = other RNA
tctggggggagctccggagggagctccgggtccgagacccccggcacctccgagagcgccaccccagagagcagcgggggcagcagcggcggcagctccaccctcaacatcgaggacgagtacaggctgcacgagacctccaaggagcccgacgtgagcctgggcagcacctggctgtccgacttcccccaggcctgggccgagaccggcggcatgggcctggccgtgcggcaggcccccctgatcatcccactgaaggccaccagcacccccgtgtccatcaagcagtaccccatgtcccaggaggctcggctgggcatcaagccccacatccagcggctgctggatcaggggatcctggtgccctgccagagcccctggaacaccccactgctgccagtgaagaagcctggcaccaacgactacaggccagtgcaggacctgagggaggtgaacaagagggtggaggacatccaccctactgtgcccaatccctacaacctgctgtctggcctgccccccagccatcagtggtacaccgtgctggacctgaaggacgccttcttctgtctgcggctgcaccccaccagccagcccctgttcgccttcgaatggagggacccagagatgggcatcagcggacagctgacctggacccggctgccccagggcttcaagaacagccccaccctgttcaatgaggccctgcaccgggacctggccgacttcaggatccagcacccagacctgatcctgctgcagtacgtggacgatctcctcctggccgccacctctgagctcgactgtcagcagggcacccgggccctgctgcagactctgggcaatctgggctaccgggccagcgccaagaaggcccagatctgccagaagcaggtgaagtacctgggctacctgctgaaggagggccagaggtggctgaccgaggccaggaaggagaccgtgatggggcagcccacccccaagaccccacggcagctgcgggagtttctggggaaggccggcttctgccggctgttcatccccggcttcgccgagatggccgcccccctgtaccccctgaccaagccagggaccctgttcaattggggtcccgaccagcagaaggcctatcaggagatcaagcaggccctgctgaccgccccagccctgggcctgcctgacctgaccaagcccttcgagctgttcgtggacgagaagcaggggtacgccaagggcgtgctgactcagaagctggggccctggcggaggcccgtggcctacctgtccaagaagctggaccccgtggcagccggctggcctccttgcctcaggatggtggccgccatcgccgtcctgaccaaggacgccggcaagctgaccatgggccagcctctggtgatcctggccccacacgccgtggaggccctggtgaagcagccacctgacaggtggctgtccaacgccaggatgacccactaccaggccctgctgctggacaccgacagggtgcagttcggccccgtggtggccctgaaccccgccactctgctgcccctgcccgaggagggcctgcagcacaactgcctggacatcctggcagaggcccacggcaccagacccgatctgaccgaccagcctctgccagatgccgaccacacctggtacaccgacggcagttccctgctgcaggaggggcagcggaaggccggggccgccgtgaccaccgagaccgaggtgatctgggccaaggccctgcccgcagggacctccgcccagagggccgagctgatcgccctgacccaggccctgaagatggccgagggcaagaagctgaacgtgtacactgactccaggtacgccttcgccaccgcccacatccacggcgagatctatcgccggcggggctggctgaccagcgagggcaaggagatcaagaacaaggatgagatcctggccctgctgaaggccctgttcctgcctaagaggctgagcatcatccactgccccggccatcagaagggccacagtgccgaggccaggggcaacaggatggccgaccaggccgcccggaaggccgccatcactgagacccctgacaccagcaccctgctgatcgagaactccagccccagcggcggctccaagaggaccgccgacggctccgagttcgagcccaagaagaagaggaaagtctaa

SEQ ID NO: 529 - RNA, 2196 nt, synthetic construct
  misc_feature 1..2196: note = Description of Artificial Sequence: Synthetic polynucleotide
  source 1..2196: mol_type = other RNA
agcgggggcagctccggcggctcctctggcagcgagactcccgggactagcgagagcgctacccccgagagctctgggggctccagcggcgggagctccaccctcaacatcgaggacgagtaccggctgcacgagacctccaaggagcccgacgtgagtctgggctccacctggctgtcagacttccctcaggcctgggccgagaccgggggcatgggcctggccgtgcgccaggccccgctgatcatccctctgaaggccaccagcacccccgtgtctatcaagcagtaccccatgtcccaggaggctcggctgggcatcaagccccacatccagcggctgctggatcaggggatcctggtgccctgccagagcccctggaacaccccactgctgcctgtgaagaagccaggcaccaacgactaccggcccgtgcaggacctgagggaggtgaacaagagggtggaggacatccaccctactgtgcccaacccctacaacctgctgagcggcctgccacccagccaccagtggtacaccgtgctggacctgaaggacgccttcttctgtctgcggctgcaccccacctcccagccactgttcgccttcgagtggcgggaccccgagatggggatcagcggccagctgacctggaccaggctccctcagggcttcaagaacagccccaccctgttcaatgaggccctgcacagggacctggccgacttcaggatccagcacccagacctgatcctgctgcagtacgtggacgacctgctgctggccgccaccagcgagctggactgccagcagggcaccagggccctgctgcagaccctgggcaatctgggctatcgggccagcgccaagaaggcccagatctgccagaagcaggtgaagtacctgggctacctgctgaaggagggacagaggtggctgaccgaggccaggaaggagaccgtgatgggccagcctaccccaaagacccctcggcagctgagggagtttctggggaaggctggcttctgccggctcttcattcctggcttcgccgagatggcagcccctctgtaccctctgaccaagcccgggaccctgttcaactggggcccagaccagcagaaggcctatcaggagatcaagcaggccctgctgaccgccccagccctgggcctgcctgacctgaccaagcccttcgagctgttcgtggacgagaagcagggctacgccaagggcgtgctgacccagaagctgggtccttggaggaggcccgtggcctacctgtccaagaagctggaccccgtggcagccggctggcctccttgcctcaggatggtggccgccatcgccgtcctgaccaaggacgccggcaagctgaccatgggccagcccctggtcatcctggccccacacgccgtggaggccctggtgaagcagccacccgacaggtggctgtccaacgccaggatgacccactaccaggccctgcttctggacaccgacagggtgcagttcggccccgtggtggccctgaaccccgccaccctgctgcctctgcccgaggagggcctgcagcacaactgcctggacatcctggcagaggcacacgggaccaggcccgacctgacagaccagcccctgccagacgctgaccacacctggtacaccgatggcagcagcctgctgcaggagggccagcggaaggccggggccgccgtgaccaccgagaccgaggtgatctgggccaaggccctgcccgcagggacctccgcccagagggccgagctgatcgccctgacccaggccctgaagatggccgagggcaagaagctgaatgtgtacaccgacagccgctacgccttcgccaccgcccacatccacggcgagatctacaggcggaggggctggctgaccagcgagggcaaggagatcaagaacaaggacgagatcctggccctgctgaaggccctgttcctccccaagcggctgtccatcattcattgccccggccatcagaagggccactctgctgaggccaggggcaatcggatggccgaccaggccgccagaaaggccgccatcaccgagacccctgacaccagcaccctgctgatcgagaacagctctcccagcgggggctccaagaggaccgccgacgggagcgagttcgagcccaagaagaagaggaaagtctaa

SEQ ID NO: 530 - RNA, 2196 nt, synthetic construct
  misc_feature 1..2196: note = Description of Artificial Sequence: Synthetic polynucleotide
  source 1..2196: mol_type = other RNA
agcggcggctccagcgggggctcctccggcagcgagacccccggcaccagcgagtcagccacccctgagagctccgggggctcctccggcggctccagcaccctgaacatcgaggacgagtacaggctgcacgagaccagcaaggagcccgacgtgagcctgggcagcacctggctgtccgacttcccccaggcctgggccgagaccggcggcatgggcctggccgtgaggcaggcccctctgatcatccccctgaaggccaccagcacccctgtgtccatcaagcagtaccccatgagccaggaggctcggctgggcatcaagccccacatccagcggctgctggatcaggggatcctggtgccctgccagagcccctggaacaccccactgctgccagtgaagaagcctggcaccaacgactacaggcccgtgcaggacctcagggaggtgaacaagcgggtggaggatatccaccccaccgtgcctaatccttacaacctgctgagcggcctgcctcccagccatcagtggtacaccgtgctggatctgaaggatgccttcttttgcctgagactgcatcccacctcccagccactgttcgccttcgagtggcgggacccagagatgggcatcagcggccagctgacctggaccaggctgcctcagggcttcaagaacagccccaccctgttcaatgaggccctgcacagggacctggccgactttcggatccagcaccctgacctgatcctgctgcagtacgtggatgacctgctgctggctgccaccagcgagctggactgccagcagggcaccagagccctgctgcagaccctggggaatctgggctatcgggccagcgccaagaaggcccagatttgccagaagcaggtcaagtacctgggctatctgctgaaggagggacagaggtggctgaccgaggccaggaaggagacagtgatgggccagcctaccccaaagactccccggcagctgagggagtttctggggaaggctggcttctgcaggctgtttattcctggcttcgccgagatggcagcccctctgtaccctctgaccaagcccggcaccctgttcaactgggggccggatcagcagaaggcctaccaggagatcaagcaggccctgctgaccgccccagccctgggcctgcctgatctgaccaagcccttcgagcttttcgtggacgagaagcagggctacgccaagggcgtgctgacccagaagctgggcccttggcggcggccagtggcctacctgtccaagaagctggacccagtggccgccggctggcccccctgtctgaggatggtggctgccatcgccgtcctgaccaaggacgccggcaagctcaccatgggccagcccctggtgatcctggccccccacgccgtggaggctctggtgaagcagccacccgacaggtggctgtccaacgccaggatgacccactaccaggccctgctgctggacaccgacagggtgcagttcgggccagtggtggccctgaaccctgccaccctgctgcccctccccgaggaggggctgcagcacaactgcctggacatcctggccgaggcccacggcaccaggccagacctgacagaccagcccctgcccgacgccgaccacacctggtacaccgacggcagcagcctgctgcaggagggccagaggaaggccggcgccgccgtgaccaccgagaccgaggtgatctgggccaaggccctgcccgctgggaccagcgcccagcgggcagagctgattgccctcacccaggccctgaagatggccgagggcaagaagctgaacgtgtacactgacagcaggtacgcgttcgccaccgcccacatccacggcgagatctaccggcgcaggggctggctgaccagcgagggcaaggagatcaagaacaaggacgagatccttgccctgctgaaggctctgttcctgcctaagaggctgagcatcatccactgccccggccaccagaaggggcacagcgccgaggccaggggcaacaggatggccgaccaggcggccagaaaggccgccatcaccgagacccccgataccagcaccctgctgatcgagaacagctctccctctggcgggagcaagagaaccgctgacggcagcgagttcgagcccaagaagaagaggaaagtctaa

SEQ ID NO: 531 - RNA, 2196 nt, synthetic construct
  misc_feature 1..2196: note = Description of Artificial Sequence: Synthetic polynucleotide
  source 1..2196: mol_type = other RNA
agcgggggctcctccggaggcagctccggcagcgagacccccggcaccagcgagagcgctactcccgagtccagcggcgggagtagcggaggctccagcaccctgaacatcgaggacgagtacaggctgcacgagacctccaaggagcccgacgtgagtctgggctccacctggctgagcgacttcccccaggcctgggccgagaccggcggcatgggcctggccgtgcggcaggcccctctgatcatccccctcaaggccaccagcacccctgtgtccatcaagcagtaccccatgtcccaggaggctcggctgggcatcaagccccacatccagcggctgctggatcaggggatcctggtgccctgccagagcccctggaacaccccactgctgcccgtgaagaagccgggcaccaacgactacaggcccgtgcaggacctgagggaggtgaacaagagggtggaggacatccaccctaccgtgcccaacccctacaacctgctgagcggcctgcccccaagccaccagtggtacaccgtgctggatctgaaggatgccttcttctgcctgaggctgcatcccacctcccagccactgttcgccttcgagtggcgggacccagagatgggcatctctgggcagctgacctggaccaggctccctcagggcttcaagaacagccccaccctgttcaatgaggccctgcacagggacctggccgactttcggatccagcaccccgacctgatcctgctgcagtacgtggacgacctgctgctggccgccaccagcgagctggactgccagcagggcaccagagccctgctgcagaccctggggaatctgggctaccgggccagcgccaagaaggcccagatttgccagaagcaggtgaagtacctgggctacctgctgaaggagggacagaggtggctgaccgaggccaggaaggagaccgtcatgggccagcctacccccaagacccccaggcagctgcgggagtttctggggaaggctggcttctgtcggctcttcattcctggcttcgccgagatggccgcccctctgtaccctctgaccaagcccgggaccctgttcaactggggtcccgaccagcagaaggcctatcaggagatcaagcaggccctgctgaccgccccagccctgggcctgcctgacctgaccaagcccttcgagctgttcgtggacgagaagcagggctacgccaagggcgtgctgacccagaagctgggcccttggcggcgccctgtggcctacctgtccaagaagctggaccccgtggccgcagggtggcctccatgcctgcggatggtggccgcgatcgccgtgctgaccaaggacgctggcaagctgaccatgggtcagccactggtgatcctggccccacacgccgtggaggccctggtgaagcagccacctgacaggtggctgtccaacgccaggatgacccactaccaggccctgcttctcgacaccgacagggtgcagttcggccccgtggtggccctgaaccccgccactctgctgcccctccccgaggaggggctgcagcacaactgtctggacattctggccgaggcccacggcactcggccagacctgacagaccagcccctccccgacgccgaccacacctggtacaccgacggcagcagcctgctgcaggaggggcagcggaaggccggggccgccgtgaccaccgagaccgaggtgatctgggccaaggccctgcccgccgggacctccgcccagagggccgagctgatcgccctgacccaggccctgaagatggccgagggcaagaagctgaacgtgtacactgacagcaggtacgccttcgctaccgcccacatccacggcgagatctacaggcgcaggggctggctgaccagcgagggcaaggagatcaagaacaaggacgagatcctggccctgctgaaggccctgttcctgcccaagcgcctgtccatcatccactgccccggccatcagaagggccactccgctgaggcccgcggcaaccggatggccgaccaggccgcccggaaggccgccatcacagagacccccgacaccagcaccctgctgatcgagaactctagccccagcggcggctccaagcggaccgccgacggctcagagttcgagcccaagaagaagaggaaagtctaa

SEQ ID NO: 532 - RNA, 2196 nt, synthetic construct
  misc_feature 1..2196: note = Description of Artificial Sequence: Synthetic polynucleotide
  source 1..2196: mol_type = other RNA
agcggcgggagctctgggggctcctctggctccgagacccccggaacctccgagagcgccactccggagagctccgggggctccagcggcggcagctctaccttgaacatcgaggacgagtaccgcctgcacgagaccagcaaggagcccgacgtgtccctgggctccacctggctgagcgactttcctcaggcctgggccgagaccgggggcatgggcctggccgtgcgccaggcccctctgatcatccccctgaaggccaccagcactcccgtgagcatcaagcagtaccctatgagccaggaggccaggctgggcatcaagccccacatccagaggctgctggaccagggcatcctggtgccctgccagagcccctggaacaccccactgctgccagtgaagaagcctggcaccaacgactacaggcccgtgcaggacctgagggaggtgaacaagagggtggaggacatccaccctaccgtgcctaacccttacaacctgctgtcgggcctgcctcctagccatcagtggtacaccgtgctggacctgaaggacgccttcttctgcctgcggctgcaccccaccagccagcctctgttcgccttcgaatggagggatcccgagatggggatcagcgggcagctgacctggacccggctgccccagggcttcaagaacagccctaccctgttcaatgaggccctgcaccgggacctggcggacttcaggatccagcacccagatctgatcctgctgcagtacgtggacgacctgctgctggccgccaccagcgagctggactgccagcagggcaccagagccctgctgcagaccctggggaatctgggctacagggccagcgccaagaaggcccagatttgccagaagcaggtgaagtatctgggctacctgctgaaggagggacagaggtggctgaccgaggccaggaaggagaccgtgatgggccagcctaccccaaagacccccaggcagctgcgggagtttctggggaaggctggcttctgccggctcttcattcctggcttcgccgagatggccgcccctctgtaccctctgaccaagcccgggaccctgttcaactggggtcccgaccagcagaaggcttatcaggagatcaagcaggccctgctgaccgccccagccctgggcctgcctgacctgactaagcctttcgagctgttcgtggacgagaagcagggctacgccaagggcgtgctgacccagaagctgggcccttggcggcggcccgtggcctacctgtccaagaagctggaccccgtggccgccggctggccaccatgcctgcgcatggtggccgccatcgccgtgctgaccaaggacgccgggaagctgaccatgggccagcccctggtgatcctggcccctcacgccgtggaggccctggtgaagcagccaccagacaggtggctgtccaacgccaggatgacccactaccaggccctgcttctggacacggacagggtgcagttcggccctgtggtggccctgaaccctgccaccctgctgcctctgcccgaggaggggctgcagcacaactgtctggacattctggccgaggcccacggcactcggccagacctgacagaccagcccctccccgacgccgaccacacctggtacacagacggcagcagcctgctgcaggagggccagcgcaaggccggcgccgccgtgaccaccgagaccgaggtgatctgggccaaggccctgcccgccggcactagcgcccagagggccgagctgatcgccctgactcaggccctgaagatggccgagggcaagaagctgaacgtgtacaccgacagccgctatgccttcgccaccgcccacatccacggcgagatctacaggaggcggggatggctgaccagcgagggcaaggagatcaagaacaaggatgagatcctggccctgctgaaggccctgttcctgcctaagcgcctgagcatcatccattgccccgggcaccagaagggccactccgctgaggcccggggcaataggatggccgatcaggccgccagaaaggccgccatcacagagacccccgacaccagcaccctgctgatcgagaactcctcccccagcggcggttctaagagaaccgccgacgggagcgagttcgagcccaagaagaagaggaaagtctaa

SEQ ID NO: 533 - RNA, 2196 nt, synthetic construct
  misc_feature 1..2196: note = Description of Artificial Sequence: Synthetic polynucleotide
  source 1..2196: mol_type = other RNA
agcgggggcagctccggaggttccagcgggtccgagacccctggaacctccgagagcgccacccccgagagcagcgggggcagcagcggcgggagctccaccctgaacatcgaggacgagtaccggctgcacgagaccagcaaggagcccgacgtgagtctgggctccacctggctctccgacttcccacaggcctgggccgagaccggggggatgggcctggccgtgcgccaggcccccctgatcatccccctgaaggccacctccacccccgtgtctatcaagcagtaccccatgtcccaggaggctcggctgggcatcaagccccacatccagcggctgctggatcaggggatcctggtgccctgccagagcccctggaacacccccctgctgcccgtgaagaagcccgggaccaacgactacaggcctgtgcaggacctgagggaggtgaacaagagggtggaggacatccaccctaccgttcccaatccctacaacctgctgtccgggctgccccccagccaccagtggtacaccgtgctggacctgaaggatgcctttttctgcctgcggctgcaccccaccagccagccactcttcgccttcgagtggcgggacccagagatgggcatcagcggccagctgacctggacccggctgccccagggcttcaagaacagccccaccctgttcaatgaggccctgcaccgggacctggccgacttcaggatccagcaccctgacctgatcctgctgcagtacgtggacgacctgctgctggccgccaccagcgagctggactgccagcagggcaccagagccctgctgcagaccctgggcaatctggggtacagggcctccgccaagaaggcccagatctgccagaagcaggtgaagtacctgggctatctgctgaaggaggggcagcggtggctcaccgaggccaggaaggagaccgtgatggggcagcccacccccaagacccccaggcagctgcgggagttcctggggaaggccggcttctgccggctgttcattcctggcttcgctgagatggctgcccccctgtaccccctgaccaagcccgggaccctgttcaactggggccccgaccagcagaaggcctaccaggagatcaagcaggccctgctgaccgccccagccctgggcctgcctgatctgaccaagcccttcgagctgttcgtggacgagaagcaggggtacgccaagggcgtgctgacccagaagctgggcccctggaggaggccggtggcctacctgtccaagaagctggaccccgtggccgccggctggccaccatgcctgaggatggtggccgccatcgccgtgctgaccaaggacgccgggaagctgaccatgggtcagcccctggtgatcctggcccctcacgccgtggaggccctggtgaagcagccacctgacaggtggctgtccaacgccaggatgactcactaccaggccctgctgctggacaccgacagggtgcagttcggccccgtggtggccctgaaccccgccactctgctgcccctgcccgaggagggcctgcagcacaactgcctggacatcctggcagaggcccacggcaccaggcccgacctgaccgaccagcctctgccagatgccgaccacacctggtacaccgacggcagcagcctgctgcaggaggggcagcggaaggccggggccgccgtgaccaccgagaccgaggtgatctgggccaaggccctgcccgccgggacctccgcccagagggccgagctgatcgccctgacccaggccctgaagatggccgagggcaagaagctgaatgtgtacaccgacagccggtacgctttcgccaccgcccacatccacggcgagatctaccggcggaggggctggctgaccagcgagggcaaggagatcaagaacaaggatgagatcctggccctgctgaaggccctgttcctccccaagcggctgagcatcattcactgccccggccatcagaagggccacagtgccgaggcccgggggaacaggatggccgaccaggccgcccggaaggccgccatcactgagacccccgacaccagcaccctgctgatcgagaactcctctcccagcggcggtagcaagcgcaccgccgatgggagcgagttcgagcccaagaagaagaggaaagtctaa

SEQ ID NO: 534 - RNA, 2196 nt, synthetic construct
  misc_feature 1..2196: note = Description of Artificial Sequence: Synthetic polynucleotide
  source 1..2196: mol_type = other RNA
agcgggggcagctccggaggctccagcgggtccgagacccctggaacctccgagagcgccacccccgagagcagcgggggctcctctgggggctccagcactctgaacatcgaggacgagtacagactgcacgagacctccaaggagcccgacgtgtctctgggcagcacctggctgtccgacttccctcaggcctgggctgagaccggtggcatgggcctggctgtgcggcaggcccccctgatcatccccctgaaggccacaagcacccctgtgtccatcaagcagtaccccatgtcccaggaggctcggctgggcatcaagccccacatccagcggctgctggatcaggggatcctggtgccctgccagagcccctggaacaccccactgctgcctgtgaagaagccaggcaccaatgactaccggccagtccaggacctgagggaggtcaacaagagggtggaggacatccaccctaccgtgcccaacccctacaacctgctgagtggcctgccccccagccaccagtggtacaccgtgctggacctgaaggatgcctttttctgtctgcggctgcaccccacctctcagcctctgttcgccttcgaatggagggaccctgagatggggatcagcgggcagctgacctggactcggctgccccagggcttcaagaacagccccaccctgttcaatgaggccctgcacagagacctggcagacttcaggatccagcacccagacctgatcctgctgcagtacgtggacgacctgctgctggccgccaccagcgagctggactgccagcagggcaccagagccctgctgcagaccctgggaaatctgggctaccgggccagcgccaagaaggcccagatttgccagaagcaggtgaagtacctgggctacctgctgaaggaggggcagcgctggctcaccgaggctcggaaggagaccgtgatgggccagcctacccctaagacccccaggcagctgcgggagttcctggggaaggccggcttctgccggctgttcatccccggcttcgctgagatggccgcccctctgtaccccctgaccaagcccggcaccctgttcaattggggccccgaccagcagaaggcttatcaggagatcaagcaggccctgctgaccgccccagccctgggcctgcctgacctgactaagcctttcgagctgttcgtggacgagaagcagggctacgccaagggggtgctgacccagaagctgggcccatggcggcggccagtggcctacctgtccaagaagctggacccagtggccgccgggtggccaccatgcctgcgcatggtggccgccatcgccgtgctgaccaaggacgccgggaagctgaccatgggtcagcccctggtgatcctggccccacacgccgtggaggccctggtgaagcagccacccgacaggtggctgtccaacgccaggatgacccactatcaggccctgcttctggacaccgacagggtgcagttcggccctgtggtggccctgaacccggccaccctgctgcccctgcccgaggagggcctgcagcacaactgcctggacatcctggcagaggcccacggcaccaggcccgacctgaccgaccagcctctgccagatgccgaccacacctggtacaccgacggcagttccctgctgcaggaggggcagcggaaggccggcgccgccgtgaccaccgagaccgaggtgatctgggccaaggccctgcctgccgggaccagcgcccagagggccgagctgatcgccctgacccaggccctgaagatggccgagggcaagaagctgaatgtgtacaccgacagcagatacgccttcgccacagcccacatccacggcgagatctaccggcgccgcggatggctgaccagcgagggcaaggagatcaagaacaaggatgagatcctggccctgctgaaggccctgtttctgcccaagcggctgagcatcattcattgccccggccatcagaagggccacagcgccgaggccaggggcaacaggatggccgaccaggccgccagaaaggccgccatcactgagacccctgacaccagcaccctgctgatcgagaactcctctcccagcggcggctccaagaggaccgccgatgggagcgagttcgagcccaagaagaagaggaaagtctaa

SEQ ID NO: 535 - RNA, 2196 nt, synthetic construct
  misc_feature 1..2196: note = Description of Artificial Sequence: Synthetic polynucleotide
  source 1..2196: mol_type = other RNA
agcgggggcagctccggaggctccagcgggtccgagacccctggaacctccgagagcgccacccccgagagctccgggggctcctctggcggcagcagtactctgaacatcgaggacgagtaccggctgcacgagaccagcaaggagcccgacgtgagcctgggcagcacctggctgtccgacttccctcaggcctgggccgagaccggggggatgggcctggccgtgcgccaggcccctctgatcatccccctgaaggccaccagcacccccgtgtccatcaagcagtaccccatgtcccaggaggctcggctgggaatcaagccccacatccagcggctgctggatcaggggatcctggttccctgccagagcccctggaacaccccactgctgccagtgaagaagcctggcaccaacgactacaggcctgtccaggacctgagggaggtgaacaagagggtggaggacatccaccctaccgtgccaaacccctacaacctgctgagcgggctgccgccctctcaccagtggtacaccgtgctggacctgaaggatgcctttttctgcctgaggctgcaccccaccagccagcctctgttcgccttcgagtggcgggacccagagatgggcatcagcggccagctgacctggaccaggctccctcagggcttcaagaacagtcccacactgttcaatgaggccctgcacagggacctggccgacttcaggatccagcaccccgatctgatcctcctgcagtacgtggacgacctgctgctggccgccaccagcgagctggactgccagcagggcaccagggccctgctgcagaccctgggaaatctgggctatcgggccagcgccaagaaggcccagatttgccagaagcaggtgaagtacctgggctacctgctgaaggagggtcagaggtggctgaccgaggcccgcaaggagaccgtgatgggccagcccacccccaagaccccacggcagctgcgcgagttcctgggaaaggccggcttctgccggctgttcatcccaggattcgccgagatggccgcccccctgtaccccctgaccaagcctggcaccctgttcaactgggggccagatcagcagaaggcttatcaggagatcaagcaggccctgctgaccgccccagccctgggcctgcctgacctgactaagccttttgagctgttcgtggacgagaagcagggctacgccaagggcgtgctgacccagaagctgggcccttggcggcggcctgtggcctacctgtccaagaagctggaccccgtggccgcaggctggccaccatgcctgcgcatggtggccgccatcgccgtgctgaccaaggacgccgggaagctgaccatgggtcagcccctggtgatcctggcccctcacgccgtggaggccctggtgaagcagccacccgacaggtggctgtccaacgccaggatgacccactaccaggccctgctgctcgacaccgacagggtgcagttcggccccgtggtggccctgaaccccgccactctgctgcccctgcctgaggaggggctgcagcacaactgtctggacattctggccgaggcccacggcactcggccagacctgacagaccagcctctgcccgacgctgaccacacctggtacaccgacggcagctccctcctgcaggaggggcagcggaaggccggggccgccgtgaccaccgagaccgaggtgatctgggccaaggccctgcccgccgggacctcggcccagagggccgagctgatcgccctgacccaggccctgaagatggccgagggcaagaagctgaacgtgtacaccgactctcggtacgccttcgctactgcccacatccacggggagatctatcggcggcggggctggctgaccagcgagggcaaggagatcaagaacaaggacgagatcctggccctgctgaaggccctgttcctgcccaagcggctgtccatcatccattgccccgggcaccagaagggccactctgctgaggcccggggcaataggatggccgaccaggccgccaggaaggccgccatcaccgagacccccgacaccagcaccctgctgatcgagaacagctcccccagcggcgggagcaagcgcaccgccgacgggagcgagttcgagcccaagaagaagaggaaagtctaa

SEQ ID NO: 536 - RNA, 2196 nt, synthetic construct
  misc_feature 1..2196: note = Description of Artificial Sequence: Synthetic polynucleotide
  source 1..2196: mol_type = other RNA
tccgggggcagctccggaggttccagcgggtccgagacccctggaacctccgagagcgccacccccgagagcagcgggggctcctctggaggctccagcaccctgaacatcgaggacgagtacaggctgcacgagacctccaaggagcccgatgtgtcactggggagcacctggctgtcagacttccctcaggcctgggccgagaccggcggcatgggcctggccgtgcgccaggcccccctgatcatccctctgaaggccaccagcaccccagtgagcatcaagcagtaccccatgtcccaggaggctcggctgggcatcaagccccacatccagcggctgctggatcaggggatcctggtgccctgccagagcccctggaacaccccactgctgcccgtgaagaagcccgggaccaacgactaccgccctgtgcaggacctgagggaggtgaacaagagggtggaggacatccaccccaccgtgcccaacccctacaacctgctgagcggcttgcccccaagccaccagtggtacaccgtgctggacctgaaggacgccttcttctgtctgaggctgcaccccaccagccagcctctgttcgccttcgagtggagagacccagagatgggcatctccgggcagctgacctggactcggctgccccagggcttcaagaacagccccaccctgttcaatgaggccctgcacagggacctggccgacttccggattcagcacccagatctgatcctgctgcagtacgtggacgacctgctgctggccgccaccagcgagctggactgccagcagggcaccagggccctgctgcagaccctggggaatctgggctatcgggccagcgccaagaaggcccagatttgccagaagcaggtgaagtatctgggctacctgctgaaggagggccagcgctggctgacagaggccaggaaggagaccgtcatgggccagcctaccccaaagactccccggcagctgcgggagtttctggggaaggccggcttctgccggctgttcatccccggcttcgccgagatggccgcccccctgtaccctctgaccaagccagggaccctgttcaactggggccccgaccagcagaaggcctaccaggagatcaagcaggccctgctgaccgccccagccctgggcctgcctgatctcaccaagcccttcgagctgttcgtggacgagaagcaggggtacgccaagggcgtgctgacccagaagctgggcccctggaggcggcccgtggcctacctgtccaagaagctggaccccgtggccgccggctggcccccttgcctgcggatggtggccgccatcgccgtcctgaccaaggacgcaggcaagctgaccatgggccagcctctggtcatcctggccccacacgccgtggaggccctggtgaagcagccacccgaccggtggctgtccaacgccaggatgacccactaccaggccctgcttctggacaccgacagggtgcagttcggccccgtggtggccctgaaccccgccactctgctgcccctgcccgaggagggcctgcagcacaactgcctggacatcctggcagaggcccacggcaccaggcctgatctgaccgaccagcccctgcccgacgcagatcacacctggtacaccgatgggtctagcctgctgcaggaggggcagcggaaggccggggccgccgtgaccaccgagaccgaggtgatctgggccaaggccctgcctgccggcacctccgcccagagggccgagctgatcgccctgacccaggccctgaagatggccgagggcaagaagctgaatgtgtacaccgacagccggtacgcattcgccaccgcccacatccatggagagatctataggaggcggggctggctgaccagcgagggcaaggagatcaagaacaaggacgagatcctggccctgctgaaggccctgttcctgcctaagaggctgagcatcatccactgccccggccatcagaagggccacagtgccgaggcccgggggaatcggatggccgaccaggccgccagaaaggccgccatcaccgagacccccgacaccagcaccctgctgatcgagaacagctccccctccggggggagcaagcggaccgccgacgggtccgagttcgagcccaagaagaagaggaaagtctaa

SEQ ID NO: 537 - RNA, 2196 nt, synthetic construct
  misc_feature 1..2196: note = Description of Artificial Sequence: Synthetic polynucleotide
  source 1..2196: mol_type = other RNA
agcggcggcagcagcggcggctccagcggcagcgagaccccagggaccagcgagagcgccacccccgagagctctggcggctcctctggaggctccagcaccctgaacatcgaggacgagtacaggctgcacgagacctccaaggagcccgatgtgtccctggggtccacctggctgtccgacttcccacaggcctgggccgagaccggagggatgggcctggccgtgcgccaggcccccctgatcatccctctgaaggccaccagcacccccgtgtccatcaagcagtaccccatgtcccaggaggctcggctgggcatcaagccccacatccagcggctgctggatcaggggatcctggtgccctgccagagcccctggaacaccccactgctgcctgtgaagaagccaggcaccaacgactaccggcccgtgcaggacctgagggaggtgaacaagagggtggaggacatccaccctactgtgcctaacccttacaacctgctgagcgggctgccccccagccaccagtggtacactgtgctggacctgaaggacgccttcttctgcctgaggctgcaccccaccagccagcccctgttcgcattcgagtggcgggatccagagatgggcatcagcggccagctgacctggactcggctgccccagggcttcaagaacagccccaccctgttcaatgaggccctgcacagggacctggccgacttcaggatccagcacccagatctgatcctgctgcagtatgtggacgacctgctgctggctgccaccagcgagctggactgccagcagggcaccagagccctgctgcagaccctggggaatctgggctatcgggccagcgccaagaaggcccagatttgccagaagcaggtcaagtacctgggctatctgctgaaggagggacagaggtggctgaccgaggccaggaaggagacagtgatgggccagcctaccccaaagacccccaggcagctgagggagtttctggggaaggctggcttctgtcggctgtttattcctggcttcgccgagatggcagcccctctgtaccctctgaccaagcctgggaccctgttcaactggggcccagatcagcagaaggcctaccaggagatcaagcaggccctgctgaccgccccagccctgggcctgcctgatctgaccaagcccttcgagctgtttgtggacgagaagcagggctacgccaagggcgtgctgacccagaagctgggcccttggcggcggccagtggcctacctgtccaagaagctggacccagtggccgccggctggcccccctgcctgaggatggtggctgccatcgccgtcctgaccaaggacgccggcaagctcaccatgggccagcccctggtcatcctggccccacacgccgtggaggccctggtgaagcagccacccgaccggtggctgtccaacgccaggatgacccactaccaggccctgctgctggacacagacagggtgcagttcggccccgtggtggccctgaaccccgccaccctgctgcccctccccgaggagggcctgcagcacaactgtctggacatcctggcagaggcccacggcaccaggccagacctgaccgatcagcctctgcccgatgccgaccacacctggtacacggacggctccagcctgctgcaggagggccagcggaaggccggagccgccgtgaccaccgagaccgaggtgatctgggccaaggccctgcccgcagggacctccgcccagagggccgagctgatcgccctgacccaggccctgaagatggccgagggcaagaagctgaacgtgtacactgactccaggtacgccttcgccaccgcccacatccatggagagatctataggaggcggggctggctgaccagcgagggcaaggagatcaagaacaaggatgagatccttgccctgctgaaggccctgttcctgcctaagaggctgagcatcatccactgccccggccatcagaagggccactcagccgaggccagggggaacaggatggccgaccaggccgcaaggaaggccgccatcaccgagacccccgataccagcaccctgctgatcgagaactcctcccccagcggcggctccaagaggaccgccgacgggagcgagttcgagcccaagaagaagaggaaagtctaa

SEQ ID NO: 538 - RNA, 2196 nt, synthetic construct
  misc_feature 1..2196: note = Description of Artificial Sequence: Synthetic polynucleotide
  source 1..2196: mol_type = other RNA
agcggggggagctccggcggctcctccgggagcgagactcccggcaccagcgagtccgccacccccgagagcagcggcggcagctccggggggagctccaccctgaacatcgaggacgagtacaggctgcacgagacctccaaggagcccgacgtgagcctgggcagcacctggctgtccgactttcctcaggcctgggccgagaccggcgggatgggcctggccgtgaggcaggcccctctgatcatccccctcaaggccaccagcacccctgtgtccatcaagcagtaccccatgtcccaggaggctcggctgggcatcaagccccacatccagcggctgctggatcaggggatcctggtgccctgccagagcccctggaacaccccactgctgccagtgaagaagcctggcaccaacgactacaggcccgtgcaggacctgagggaggtgaacaagagggtggaggacatccaccctaccgtgcccaacccctacaacctgctgagcggcctgcctcccagccaccagtggtacaccgtgctggacctgaaggacgccttcttctgcctgaggctgcaccccacctctcagcctctcttcgccttcgagtggagagaccctgagatggggatcagcgggcagctgacctggacccggctgccccagggcttcaagaacagccctacgctgttcaatgaggccctgcaccgggacctggccgacttcaggatccagcaccccgacctgatcctgctgcagtacgtggacgacctgctgctggccgccactagtgagctggactgccagcagggcaccagagccctgctgcagaccctgggcaatctggggtacagggccagcgccaagaaggcccagatctgccagaagcaggtgaagtacctgggctacctgctgaaggagggccagcggtggctgaccgaggcccggaaggagaccgtcatgggccagcctaccccaaagacccctcggcagctgagggagtttctggggaaggctggcttctgtcggctgttcatccccggcttcgccgagatggccgcccccctgtaccccctgaccaagcccgggaccctgttcaattggggtcccgaccagcagaaggcctaccaggagatcaagcaggccctgctgaccgccccagccctgggcctgcctgatctcaccaagcccttcgagctgttcgtggacgagaagcagggctacgccaagggcgtgctgacccagaagctgggcccttggcggcggccggtggcctacctgtccaagaagctggaccccgtggccgccggctggccaccatgcctgcgcatggtggccgccatcgccgtgctgaccaaggacgccgggaagctgaccatgggtcagcccctggtgatcctggcccctcacgccgtggaggccctggtgaagcagccacccgacaggtggctgtccaacgccaggatgacccactaccaggccctgctgctggacaccgacagggtgcagttcggcccggtggtggccctgaaccccgccaccctgctgcccctccccgaggaggggctgcagcacaactgcctggacatcctggcagaggcccacggcaccaggcccgacctgaccgaccagcctctgccagatgccgaccacacctggtacaccgacggcagcagcctgctgcaggagggccagcggaaggcaggcgccgccgtgaccaccgagaccgaggtgatctgggccaaggccctgcccgctggcacctccgcccagcgggccgagctgatcgccctgacccaggccctgaagatggccgagggcaagaagctgaacgtgtacactgacagcaggtacgccttcgccaccgcccacatccacggcgagatctacaggcgcaggggctggctgaccagcgagggcaaggagatcaagaacaaggatgagatccttgccctgctgaaggccctgttcctgcccaagcgcctgtccatcatccactgccccggccatcagaagggccactctgctgaggccaggggcaatcggatggccgaccaggccgccaggaaggccgccatcaccgagacccctgacaccagcaccctgctgatcgagaactcctcccccagcggcggctccaagaggaccgccgacgggagcgagttcgagcccaagaagaagaggaaagtctaa

SEQ ID NO: 539 - RNA, 2196 nt, synthetic construct
  misc_feature 1..2196: note = Description of Artificial Sequence: Synthetic polynucleotide
  source 1..2196: mol_type = other RNA
tcaggggggagcagcggggggtccagcggcagcgagacccccggcaccagcgagagcgccacccctgagagctccgggggctccagcgggggcagctccaccctgaacatcgaggacgagtacaggctgcacgagacctccaaggagcccgacgtgagcctgggctccacctggctgagcgacttccctcaggcctgggccgagaccggcggcatggggctggccgtgaggcaggcccccctgatcatccctctgaaggccaccagcacccccgtgtccatcaagcagtaccccatgtcccaggaggctcggctgggcatcaagccccacatccagcggctgctggatcaggggatcctggtgccctgccagagcccctggaacacccccctgctgcccgtgaagaagcctggtaccaacgactacaggcccgtgcaggacctgagggaggtgaacaagagggtggaggacatccaccctactgtgcctaacccttacaacctgctgagcggcctgcctccctcccaccagtggtacacagtgctggacctgaaggatgccttcttctgcctgaggctgcatcctaccagccagccactgtttgcctttgagtggagggaccccgagatggggatcagcggccagctgacctggaccaggctgccccagggcttcaagaacagccccaccctgttcaatgaggccctgcaccgggacctggccgacttcagaatccagcaccccgatctgatcctgctgcagtacgtggacgacctgctgctggccgccaccagcgagctggactgccagcagggcaccagagccctgctgcagaccctggggaatctgggctacagggccagcgccaagaaggcccagatttgccagaagcaggtgaagtatctggggtacctgctgaaggagggtcagcggtggctgaccgaggccaggaaggagacagtgatgggccagcctaccccaaagactccccggcagctgcgggagttcctggggaaggctggcttctgcaggctgttcatccccggcttcgccgagatggcagccccactgtaccccctgaccaagccagggaccctgttcaactggggccccgaccagcagaaggcctatcaggagatcaagcaggccctgctgaccgccccagccctgggcctgcctgacctgaccaagcccttcgagctgttcgtggacgagaagcagggctacgccaagggcgtgctgacccagaagctgggcccttggcggcggccagtggcctacctgtccaagaagctggaccccgtggccgctggctggcctccatgcctgcggatggtggccgccatcgccgtgctgaccaaggacgctggcaagctgaccatgggccagccactggtgatcctggccccacacgccgtggaggccctggtgaagcagccacccgacaggtggctgtccaacgccaggatgacccactaccaggccctgcttctggacaccgacagggtgcagttcggccccgtggtggccctgaaccccgccaccctgctgcccctgcccgaggagggcctgcagcacaactgcctggacatcctggccgaggcccacggcaccaggcccgacctgaccgaccagcctctgccagatgccgaccacacctggtacaccgacggcagcagcctgctgcaggaggggcagcggaaggccggggccgccgtgaccaccgagaccgaggtgatctgggccaaggccctgcccgccggcacctccgcccagagggccgagctgatcgccctgacccaggccctgaagatggccgagggcaagaagctgaatgtgtacacggacagccggtacgcattcgccaccgcccacatccacggggagatctaccggcggagggggtggctgaccagcgagggcaaggagatcaagaacaaggacgagatcctggccctgctgaaggccctgttcctgcctaagaggctgagcatcatccactgccccggccatcagaagggccacagcgcagaggccagggggaacaggatggccgaccaggccgcaaggaaggccgccatcaccgagacccccgacaccagcaccctgctgatcgagaactcctctcccagcggcggctccaagcggaccgccgatgggagcgagttcgagcccaagaagaagaggaaagtctaa

SEQ ID NO: 540 - RNA, 2196 nt, synthetic construct
  misc_feature 1..2196: note = Description of Artificial Sequence: Synthetic polynucleotide
  source 1..2196: mol_type = other RNA
agcggggggtctagcggcggcagcagcggcagcgagacccccggcacctccgagagcgccaccccagagagctctggggggagctccggaggctccagcaccctgaacatcgaggacgagtacaggctgcacgagaccagcaaggagcccgacgtgagtctgggctccacctggctgtccgacttccctcaggcctgggccgagaccggcggcatgggcctggccgtgcggcaggcccctctgatcatccctctgaaggccaccagcacccccgtgagcatcaagcagtaccccatgtcccaggaggctcggctgggcatcaagccccacatccagcggctgctggatcaggggatcctggtgccctgccagagcccctggaacacccccctgctgcccgtgaagaagcccgggaccaacgactacaggcccgtgcaggacctgagggaggtgaacaagagggtggaggacatccaccctaccgtgccaaacccctacaacctgctgagcgggctgccgccctctcaccagtggtacaccgtgctggacctgaaggacgcctttttctgtctgaggctgcaccccaccagccagcctctgttcgccttcgaatggagagacccagagatggggatctccgggcagctgacctggacccggctgccccagggcttcaagaacagccccaccctgttcaatgaggccctgcacagagacctggccgacttcaggatccagcacccagatctgatcctgctgcagtacgtggacgacctgctgctggccgccaccagcgagctggactgccagcagggcaccagggccctgctgcagaccctggggaatctgggctatcgggccagcgccaagaaggcccagatttgccagaagcaggtgaagtatctgggctacctgctgaaggagggacagaggtggctgaccgaggccaggaaggagaccgtgatgggccagcctaccccaaagacccccaggcagctgagggagtttctggggaaggctggcttctgccggctctttattcctggcttcgccgagatggcagcccctctgtaccctctgaccaagcccgggaccctgttcaactggggtcccgaccagcagaaggcctaccaggagatcaagcaggccctgctgaccgccccagccctgggcctgcctgatctcaccaagcccttcgagctgttcgtggacgagaagcagggctacgccaagggcgtgctgacccagaagctgggcccttggcggaggcccgtggcctacctgagcaagaagctggaccccgtggcagccggctggcctccttgcctgaggatggtggccgccatcgccgtgctcaccaaggacgccggcaagctgaccatgggccagcctctggtgatcctggcccctcacgccgtggaggctctggtgaagcagcctcccgacagatggctgagcaacgccaggatgacccactaccaggccctgcttctggacaccgacagggtgcagttcggcccagtggtggccctgaaccccgccaccctgctgcctctgcccgaggagggcctgcagcacaactgcctggacatcctggcagaggcccacggcacccggcctgatctgaccgatcagcctctgcccgacgccgaccacacctggtacaccgacggcagcagcctgctgcaggaggggcagaggaaggccggggccgccgtgaccaccgagaccgaggtgatctgggccaaggccctgcccgcagggacctccgcccagagggccgagctgatcgccctgacccaggccctgaagatggccgagggcaagaagctgaatgtgtacaccgacagccggtacgcattcgccaccgcccacatccacggggagatctaccggcggagggggtggctgaccagcgagggcaaggagatcaagaacaaggatgagatccttgccctgctgaaggctctgtttctgcctaagagactgagcatcatccactgccccggccatcagaagggccacagcgccgaggcccgggggaatcggatggccgaccaggccgccaggaaggccgccatcaccgagacccccgacaccagcaccctgctgatcgagaactcctcccccagcggcggttctaagagaaccgccgacgggagcgagttcgagcccaagaagaagaggaaagtctaa

SEQ ID NO: 541 - RNA, 2196 nt, synthetic construct
  misc_feature 1..2196: note = Description of Artificial Sequence: Synthetic polynucleotide
  source 1..2196: mol_type = other RNA
agcggggggtctagcggcggcagcagcggcagcgagacccccgggaccagcgagtcagccactcccgagagctccgggggctcctctggaggctccagcaccctgaacatcgaggacgagtacaggctgcacgagacctccaaggagcccgacgtgagcctcgggagcacctggctgtccgacttcccccaggcctgggccgagaccggcggcatgggcctggccgtgaggcaggcccctctcatcatccctctgaaggccaccagcacccctgtgagcatcaagcagtaccccatgtcccaggaggctcggctgggcatcaagccccacatccagcggctgctggatcaggggatcctggtgccctgccagagcccctggaacaccccactgctgcccgtgaagaagccgggcaccaatgattacaggcccgtgcaggacctgagggaggtgaacaagcgggtggaggatatccaccccaccgtgcccaatccttacaacctgctgagcggcctgcctcccagccaccagtggtacaccgtgctggacctgaaggacgccttcttctgtctgcggctgcaccccaccagccagcctctgttcgccttcgaatggagggatcccgagatggggatcagcggacagctgacctggaccaggctccctcagggcttcaagaacagccccaccctgttcaatgaggccctgcacagggacctggccgacttcaggatccagcaccccgacctgatcctgctgcagtacgtggacgacctgctgctggccgccactagtgagctggactgccagcagggcaccagagccctgctgcagaccctgggcaatctggggtacagggcctcggccaagaaggcccagatctgccagaagcaggtgaagtacctgggctacctcctgaaggagggtcagcggtggctgaccgaggccaggaaggagaccgtgatgggccagcctaccccaaagacccccaggcagctgcgggagtttctggggaaggctggcttctgccggctcttcattcctggcttcgccgagatggccgcccccctgtaccccctgaccaagcccgggaccctgttcaactggggccccgaccagcagaaggcctaccaggagatcaagcaggccctgctgaccgccccagccctgggcctgcctgatctcaccaagcccttcgagctgttcgtggacgagaagcagggctacgccaagggcgtgctgacccagaagctgggcccttggcggcggccagtggcctacctgtccaagaagctggaccccgtggccgctggctggccaccatgcctgcgcatggtggccgccatcgccgtgctgaccaaggacgccgggaagctgaccatgggtcagcccctggtgatcctggctccccacgccgtggaggccctggtgaagcagccacccgaccggtggctgtccaacgccaggatgacccactaccaggccctgctgctggacaccgacagggtgcagttcggccctgtggtggccctgaaccccgccacgctgctgcccctccccgaggaggggctgcagcacaactgcctggacatcctggcagaggcccacggcaccaggcccgacctgaccgaccagcctctgccagatgccgaccacacctggtacaccgacggcagcagcctgctgcaggagggccagcggaaggccggggccgccgtgaccaccgagaccgaggtgatctgggccaaggccctgcccgctggcacctccgcccagcgggccgagctgatcgccctgacccaggccctgaagatggccgagggcaagaagctgaacgtgtataccgacagccggtatgccttcgccaccgcccacatccatggagagatctataggaggcggggctggctgaccagcgagggcaaggagatcaagaataaggatgagatcctggccctgctgaaggccctgttcctgcctaagaggctgagcatcatccactgccccggccatcagaagggccacagtgccgaggcccgggggaaccggatggccgaccaggccgccaggaaggccgccatcacggagacccccgacaccagcaccctgctgatcgagaactcctctcccagcggcggctccaagaggaccgccgatgggagcgagttcgagcccaagaagaagaggaaagtctaa

SEQ ID NO: 542 - RNA, 2196 nt, synthetic construct
  misc_feature 1..2196: note = Description of Artificial Sequence: Synthetic polynucleotide
  source 1..2196: mol_type = other RNA
agcggaggcagctccgggggaagcagcggcagcgagaccccagggacctctgagtccgccacccccgagagcagcggggggagcagcggaggctccagcaccctgaacatcgaggacgagtacaggctgcacgagacctccaaggagccagacgtgtccctggggtccacctggctgtccgacttcccccaggcctgggctgagaccggcggcatgggactggcagtgcgccaggctcccctgatcatccccctgaaggccaccagcaccccggtgtccatcaagcagtacccaatgagccaggaggctcggctgggcatcaagcctcacatccagaggctgctggatcaggggatcctggtgccctgccagtccccctggaacaccccactgctgcccgtcaagaagcccgggaccaacgactacaggccagtgcaggacctgagggaggtgaacaagagggtggaggacatccaccctactgtgcctaacccttacaacctgctgtctggcctgccccccagccatcagtggtacacggtgctggatctgaaggatgcctttttctgcctgaggctgcaccccaccagccagcctctgttcgccttcgagtggcgggacccagagatgggcatcagcggccagctgacctggaccaggctccctcagggcttcaagaacagccccaccctgttcaatgaggccctgcacagggacctggccgactttcggatccagcaccctgacctgatcctgctgcagtacgtggacgacctgctgctggccgccaccagcgagctggactgccagcagggcaccagagccctgctgcagaccctggggaacctgggctatagggcctctgccaagaaggcccagatctgtcagaagcaggtgaagtacctgggctacctgctgaaggagggccagcggtggctgacagaggcccgcaaggagaccgtgatgggccagcccacccccaagacccctcggcagctgagggagttcctgggcaaggccggcttctgcaggctgttcatccccgggttcgccgagatggccgcccccctgtaccccctgaccaagccaggcaccctgttcaactgggggcccgaccagcagaaggcctatcaggagatcaagcaggccctgctgaccgccccagccctgggcctgcctgacctgaccaagcccttcgagctgttcgtggacgagaagcaggggtacgccaagggcgtgctgacccagaagctgggcccttggcggcggcccgtggcctacctgagcaagaagctggaccccgtggcagccggctggcctccttgtctgcgcatggtggccgccatcgccgtgctgaccaaggacgccggcaagctgaccatgggccagcctctggtgatcctggccccacacgccgtggaggccctggtgaagcagccacctgacaggtggctgtccaacgccaggatgacccactatcaggccctcctgctggacacagacagagtgcagttcgggccagtggtggccctgaaccctgccactctgctgcccctgccagaggagggcctgcagcacaactgcctggacatcctggccgaggcccacggcactcggccagacctgacagaccagcccctgcccgacgccgaccacacctggtacaccgacggcagcagcctgctgcaggagggccagaggaaggccggcgccgccgtgaccaccgagaccgaggtgatctgggccaaggccctgccagccggcacctctgcccagagggccgagctgatcgccctgacccaggccctgaagatggccgagggcaagaagctgaatgtgtacaccgactcccggtacgcattcgctaccgcccacatccacggcgagatctaccggcgcaggggctggctgaccagcgaggggaaggagatcaagaacaaggacgagatcctggccctgctgaaggccctgttcctgccaaagcggctgagcatcatccactgccctggccaccagaagggccactcagcagaggcccgcggcaaccggatggccgaccaggccgcccggaaggccgccatcaccgagacccccgacaccagcaccctgctgatcgagaactcctccccctccggcggcagcaagcgcaccgccgacgggagcgagttcgagcccaagaagaagaggaaagtctaa

SEQ ID NO: 543 - RNA, 2196 nt, synthetic construct
  misc_feature 1..2196: note = Description of Artificial Sequence: Synthetic polynucleotide
  source 1..2196: mol_type = other RNA
tccggggggtctagcggcggcagcagcggcagcgagacccccgggaccagcgagagtgctaccccagagagctccggcggcagctccggcggctccagcaccctgaacatcgaggacgagtacaggctgcacgagaccagcaaggagcccgacgtgagcctggggagcacctggctgagcgacttccctcaggcctgggccgagaccggggggatgggcctggccgtgcgccaggcccccctgatcatccccctgaaggccaccagcacccctgtgtccatcaagcagtaccccatgtcccaggaggctcggctgggcatcaagccccacatccagcggctgctggatcaggggatcctggtgccctgccagagcccctggaacaccccactgctgccggtgaagaagcccggcaccaacgactacaggcccgtgcaggacctgagggaggtcaacaagagggtggaggacatccaccctactgtgcccaacccctacaacctgctgagcggcctgccacccagccaccagtggtacaccgtgctggacctgaaggacgcctttttctgtctgagactgcaccctacctctcagcctctgtttgccttcgagtggagggatccagagatgggcatcagcggccagctgacctggacccgcctgccccagggcttcaagaacagccccacgctgttcaatgaggccctgcacagagacctggccgacttcaggatccagcaccccgacctgatcctgctgcagtacgtggacgacctgctgctggccgccaccagcgagctggactgccagcagggcacccgggccctgctgcagaccctgggcaatctgggctatcgggccagcgccaagaaggcccagatctgccagaagcaggtgaagtacctgggctacctgctgaaggagggccagcggtggctgaccgaggccaggaaggagaccgtgatgggccagcctaccccaaagacccccaggcagctgagggagtttctggggaaggctggcttctgccggctcttcattcctggcttcgctgagatggccgccccactgtaccccctgaccaagccagggaccctgttcaactggggccccgaccagcagaaggcctatcaggagatcaagcaggccctgctgaccgccccagccctgggcctgcctgacctgaccaagcccttcgagctgttcgtggacgagaagcagggctacgccaagggcgtgctgacccagaagctgggcccttggcggcgccctgtggcctatctcagcaagaagctggaccccgtggcagccggctggcctccttgtctgcgcatggtggccgccatcgccgtgctgaccaaggacgccggcaagctgaccatgggccagcctctggtgatcctggccccccacgccgtggaggctctggtgaagcagccacccgacaggtggctgtccaacgccaggatgacccactaccaggccctcctgctggacaccgacagggtgcagttcggccctgtggtggccctgaaccccgccaccctgctgcccctgccagaggagggcctgcagcacaactgcctggacatcctggccgaggcccacggcaccaggccagacctgacagaccagcccctgcctgacgccgaccacacctggtacaccgacggcagcagcctgctgcaggagggccagaggaaggccggcgccgccgtgaccaccgagaccgaggtgatctgggcgaaggctctgcccgctgggaccagcgcccagcgggcagagctgatcgccctgacccaggccctgaagatggccgagggcaagaagctgaatgtgtacaccgacagccggtacgcattcgccactgcccacatccacggcgagatctacaggcggaggggctggctgaccagcgagggcaaggagatcaagaacaaggacgagatcctggccctgctgaaggccctgtttctgcccaagcggctgagcatcatccactgccccggccaccagaagggccacagcgccgaggcccgggggaatcggatggccgaccaggccgcccggaaggccgccatcaccgagacccccgacaccagcaccctgctgatcgagaactcctcccccagcggcgggagcaagcgcaccgccgacgggagcgagttcgagcccaagaagaagaggaaagtctaa

SEQ ID NO: 544 - RNA, 2196 nt, synthetic construct
  misc_feature 1..2196: note = Description of Artificial Sequence: Synthetic polynucleotide
  source 1..2196: mol_type = other RNA
agcggcgggagctccggcggcagctccgggagcgagactcctggcaccagcgagtccgccactcccgagagctccggcggcagctccggcggcagcagcaccctgaacatcgaggacgagtacaggctgcacgagaccagcaaggagcccgacgtgagtctgggctccacctggctctccgacttcccacaggcctgggccgagaccgggggcatggggctggccgtgaggcaggcccccctgatcatccctctgaaggccacctccacccccgtgtctatcaagcagtaccccatgtcccaggaggctcggctgggcatcaagccccacatccagcggctgctggatcaggggatcctggtgccctgccagagcccctggaacaccccactgctgcccgtgaagaagcccgggaccaacgactaccggcccgtgcaggacctgcgggaggtcaacaagagggtggaggacatccaccctaccgtgcccaacccctacaacctgctgagtggcttgcccccaagccaccagtggtacaccgtgctggacctgaaggacgccttcttctgcctgcggctgcaccccaccagccagcctctgttcgccttcgaatggagggacccagagatgggcatcagcgggcagctgacctggaccaggctgcctcagggcttcaagaacagccccaccctgttcaatgaggccctgcacagggacctggccgacttcaggatccagcaccccgacctgatcctgctgcagtacgtggacgacctgctgctggccgccaccagcgagctggactgccagcagggcaccagagccctgctgcagaccctggggaatctgggctacagggccagcgccaagaaggcccagatttgccagaagcaggtgaagtacctgggctacctgctgaaggagggccagcggtggctgaccgaggctcggaaggagacagtgatggggcagccaacccccaagactccccggcagctgcgggagttcttgggcaaggccggcttctgccggctgttcattcccggcttcgccgagatggctgccccactgtaccctctgaccaagcccggcaccctcttcaactggggcccagaccagcagaaggcttatcaggagatcaagcaggccctgctgaccgccccagccctgggcctgcctgacctgactaagcctttcgagctgttcgtggacgagaagcagggctacgccaagggcgtgctgacccagaagctgggcccttggcgccggccggtggcctacctgtccaagaagctggaccccgtggccgccggctggcctccttgcctgaggatggtggccgccatcgccgtgctcaccaaggacgccgggaagctgaccatggggcagcccctggtcatcctggcgccccacgccgtggaggccctggtgaagcagccacctgacaggtggctgtccaacgccaggatgacccactaccaggccctgctgctggacaccgacagggtgcagttcggccccgtggtggccctgaaccccgccactctgctgcccctgcccgaggagggcctgcagcacaactgcctggacattctggccgaggcccacggcactcggccagacctgaccgatcagcctctgcccgacgctgatcacacctggtacacagacggcagcagcctgctgcaggaggggcagcggaaggccggggccgccgtgaccaccgagaccgaggtgatctgggccaaggccctgcccgcagggacctccgcccagagggccgagctgatcgccctgacccaggccctgaagatggccgagggcaagaagctgaatgtgtacaccgacagccgctacgccttcgccaccgcccacatccacggcgagatctaccggcggcggggatggctgaccagcgagggcaaggagatcaagaacaaggatgagatcctggccctgctgaaggccctgttcctgcccaagcggctgtccatcattcactgccccggccatcagaagggccacagcgctgaggccaggggcaacaggatggccgaccaggccgccagaaaggccgccatcactgagacccctgacaccagcaccctgctgatcgagaacagcagccccagcggcggctccaagaggaccgccgatgggagcgagttcgagcccaagaagaagaggaaagtctaa

SEQ ID NO: 545 - RNA, 2196 nt, synthetic construct
  misc_feature 1..2196: note = Description of Artificial Sequence: Synthetic polynucleotide
  source 1..2196: mol_type = other RNA
agcggggggagcagcggggggagctcagggtctgagacccccggcaccagcgagtctgccacccctgagagcagcgggggcagctccgggggctccagcaccctgaacatcgaggacgagtacagactgcacgagaccagcaaggagcccgacgtgagtctgggctccacctggctgtctgactttcctcaggcctgggccgagaccggcggcatgggcctggccgtgcgccaggcccccctgatcatccccctgaaggccaccagcacccccgtgagcatcaagcagtaccccatgtcccaggaggctcggctgggcatcaagccccacatccagcggctgctggatcaggggatcctggtgccctgccagagcccctggaacaccccactgctgccagtgaagaagcctggcaccaacgactatcgccccgtgcaggacctgcgcgaggtgaacaagagggtggaggacatccaccctactgtgcccaacccttacaacctgctgagtggcctgccccccagccaccagtggtacaccgtgctggacctgaaggacgcctttttctgtctgcggctgcaccccaccagccagcctctgttcgccttcgagtggcgggacccagagatgggcatctccggccagctgacctggacccggctgccccagggcttcaagaacagccccacgctgttcaatgaggccctgcacagagacctggccgacttcaggatccagcaccccgacctgatcctgctgcagtacgtggacgacctgctgctggcagccactagtgagctggactgccagcagggcaccagagccctgctgcagaccctgggcaacctgggctacagggccagcgctaagaaggcccagatctgccagaagcaggtgaagtacctgggctacctgctgaaggagggccagcgctggctgaccgaggctaggaaggagacagtgatggggcagccaacccccaagactccccggcagctgcgggagtttctcggcaaggccgggttctgcagactgttcatccccggctttgccgagatggctgccccactgtaccctctgaccaagcccggcaccctgttcaactggggcccagaccagcagaaggcctatcaggagatcaagcaggccctgctgaccgccccagccctgggcctgcctgacctgaccaagcccttcgagctgttcgtggacgagaagcagggctacgccaagggcgtgctgacccagaagctgggcccttggcggaggcccgtggcctacctgagcaagaagctggaccccgtggcagccggctggcctccttgtctgcgcatggtggccgccatcgccgtgctgaccaaggacgccggcaagctgaccatgggccagcctctggtgatcctggccccacacgccgtggaggccctggtgaagcagccacctgacaggtggctgtccaacgccaggatgacccactaccaggccctgctgctcgacaccgacagggtgcagttcggccctgtggtggcgctgaatccagccaccctgctgcccctccccgaggaggggctgcagcacaactgcctggatatcctggccgaggcccacggcaccaggccggacctgaccgaccagcccctgcctgatgccgaccacacctggtacaccgacggctccagcctgctgcaggagggccagcggaaggctggagccgccgtgaccaccgagaccgaggtgatctgggccaaggccctgcccgccggcaccagcgcccagagggccgagctgatcgccctgacccaggccctgaagatggccgagggcaagaagctgaacgtgtacaccgacagccggtacgccttcgccaccgcccacatccacggcgagatctacaggcgcaggggctggctgaccagcgagggcaaggagatcaagaacaaggacgagatcctggccctgctgaaggccctgttcctgcccaagcgcctgtccatcatccactgccccggccatcagaagggccacagtgccgaggcccgggggaatcggatggccgaccaggccgccaggaaggccgccatcaccgagacccccgacaccagcaccctgctgatcgagaactcctctcccagcggcggctccaagaggaccgccgatgggagcgagttcgagcccaagaagaagaggaaagtctaa

SEQ ID NO: 546 - RNA, 2196 nt, synthetic construct
  misc_feature 1..2196: note = Description of Artificial Sequence: Synthetic polynucleotide
  source 1..2196: mol_type = other RNA
agcggggggagctccggaggttccagcgggtccgagacccctggaacctccgagagcgctacccccgagagcagcggcggcagctccgggggtagcagcaccctgaacatcgaggacgagtacaggctgcacgagacctccaaggagcccgacgtgagtctgggctccacctggctgtccgacttcccccaggcctgggctgagaccggcggcatgggcctggccgtgagacaggccccactgatcatcccactgaaggccaccagcaccccagtgagcatcaagcagtaccccatgtctcaggaggccaggctggggatcaagccccacatccagaggctgctggaccagggcatcctggtgccctgccagagcccctggaacacccccctgctgccggtcaagaagcccgggaccaacgactacaggcccgtgcaggacctgcgggaggtgaataagagagtggaggacatccaccccaccgtccccaatccttacaacctcctgtcaggcctgccacccagccaccagtggtacaccgtgctggatctgaaggatgcctttttctgcctgaggctgcaccccaccagccagcctctgttcgccttcgagtggcgggacccagagatgggcatcagcggccagctgacctggaccaggctccctcagggcttcaagaacagccccaccctgttcaatgaggccctgcacagggacctggccgactttcggatccagcaccccgacctgatcctgctgcagtacgtggacgacctgctgctggccgccaccagcgagctggactgccagcagggcaccagagccctgctgcagaccctggggaatctgggctatcgggccagcgccaagaaggcccagatttgccagaagcaggtcaagtacctgggctatctgctgaaggagggacagaggtggctgaccgaggccaggaaggagaccgtgatgggccagcctaccccaaagacccccaggcagctgcgggagtttttggggaaggctggcttctgccggctgttcattcctggcttcgccgagatggcagcccctctgtaccctctgaccaagcctgggaccctgttcaactggggcccagatcagcagaaggcctaccaggagatcaagcaggccctgctgaccgccccagccctgggcctgcctgatctgaccaagcccttcgagctgttcgtggacgagaagcagggctacgccaagggcgtgctgacccagaagctgggcccatggcggcggcccgtggcctacctgtccaagaagctggaccccgtggccgcgggctggccaccatgcctgcgcatggtggccgccatcgccgtcctgaccaaggacgccggcaagctgaccatgggccagcctctggtgatcctggccccacacgccgtggaggccctggtgaagcagccacctgacaggtggctgtccaacgccaggatgacccactatcaggccctgcttctggacaccgacagggtgcagttcggccctgtggtggccctgaacccggccaccctgctgcccctccccgaggaggggctgcagcacaactgcctcgacatcctggccgaggcccacggcaccaggcctgatctgaccgatcagcccctgcctgatgccgaccacacctggtacaccgacggcagcagcctgctgcaggaggggcagaggaaggccggggccgccgtgaccaccgagaccgaggtgatctgggccaaggccctgcctgccggcacctctgcccagagggccgagctgatcgccctgacccaggccctgaagatggccgagggcaagaagctgaacgtgtacaccgacagccggtacgccttcgccaccgcccacatccacggcgagatctacaggcgccggggctggctgaccagcgagggcaaggagatcaagaacaaggacgagatcctggccctgctgaaggccctgttcctgcccaagcgcctgagcatcatccactgccccggccatcagaagggccacagcgccgaggcccgggggaatcggatggccgaccaggccgccaggaaggcggccatcaccgagacccccgacacctccactctgctgatcgagaacagcagccccagtgggggctccaagcgcactgccgacggcagtgagttcgagcccaagaagaagaggaaagtctaa

SEQ ID NO: 547 - RNA, 2196 nt, synthetic construct
  misc_feature 1..2196: note = Description of Artificial Sequence: Synthetic polynucleotide
  source 1..2196: mol_type = other RNA
agcggcggcagctctggcggctcctctgggagcgagacccctggcaccagcgagtccgccacccccgagagctccggcgggagctccggggggtcctccaccctgaacatcgaggacgagtaccgcctgcatgagacctctaaggagcctgacgtgagtctgggcagcacctggctgtccgacttccctcaggcctgggccgagaccggggggatgggcctggccgtgcgccaggcccccctgatcatccccctgaaggccaccagcacccctgtgagcatcaagcagtaccctatgagccaggaggccaggctgggcatcaagccccacatccagaggctgctggaccagggcatcctggtgccctgccagagcccctggaacaccccactgctgccagtgaagaagcctggcaccaacgactacaggcctgtgcaggacctgagggaggtgaacaagagggtggaggacatccaccctactgttcccaatccctacaacctgctgtcaggcctgcctcctagccatcagtggtacaccgtgctggatctgaaggacgccttcttctgtctgcggctgcaccccacctcccagccactgttcgccttcgagtggcgggaccccgagatggggatcagcggccagctgacatggaccaggctccctcagggcttcaagaacagccccaccctgttcaatgaggccctgcacagggacctggccgactttcggatccagcacccagatctgatcctgctgcagtacgtggacgacctgctgctggccgccaccagcgagctggactgccagcagggcaccagagccctgctgcagaccctggggaatctgggctatcgggccagcgccaagaaggcccagatttgccagaagcaggtgaagtatctgggctacctgctgaaggagggacagaggtggctgaccgaggccaggaaggagaccgtgatgggccagcctaccccaaagacccccaggcagctgcgggagtttctggggaaggctggcttctgccggctgttcattcctggcttcgccgagatggccgcccctctgtaccccctgaccaagcccgggaccctgttcaactggggtcccgaccagcagaaggcctaccaggagatcaagcaggccctgctgaccgccccagccctgggcctgcctgatctgaccaagcccttcgagctgttcgtggacgagaagcagggctacgccaagggcgtgctgacccagaagctgggcccttggcggcggcccgtggcctacctgtccaagaagctggaccccgtggccgccggctggccaccatgcctgcgcatggtggccgccatcgccgtgctgaccaaggacgccgggaagctgaccatgggccagcccctggtgatcctggccccacacgccgtggaggccctggtgaagcagccacctgacaggtggctgtccaacgccaggatgacccactaccaggccctgcttctggacaccgacagggtgcagttcggcccagtggtggccctgaaccccgccaccctgctgcccctgcccgaggaggggctgcagcacaactgtctggacatcctggccgaggctcacggcacccggcccgacctgacagaccagcctctgcccgacgccgaccacacctggtacaccgacggcagcagcctgctgcaggagggccagcggaaggccggagccgccgtgaccaccgagacagaggtgatctgggccaaggccctgcccgccgggacctccgcccagagggccgagctgatcgccctgacccaggccctgaagatggccgagggcaagaagctgaacgtgtacactgacagcaggtacgcgttcgccaccgcccacatccacggcgagatctacaggcggcggggatggctgaccagcgagggcaaggagatcaagaacaaggatgagatcctggccctgctgaaggccctgttcctgcccaagcgcctgtccatcatccactgccccggccatcagaagggccactctgctgaggcccgcggcaaccggatggccgaccaggccgcccggaaggccgccatcacagagacccccgataccagcaccctgctgatcgagaactccagccccagcggcgggagcaagcgcaccgccgacggcagcgagttcgagcccaagaagaagaggaaagtctaa

SEQ ID NO: 548 - RNA, 2196 nt, synthetic construct
  misc_feature 1..2196: note = Description of Artificial Sequence: Synthetic polynucleotide
  source 1..2196: mol_type = other RNA
agcggaggctccagcggcggcagctccggcagcgagactccagggactagcgagtccgctacccctgagtctagcggcggcagcagcggcggctccagcaccctgaacatcgaggacgagtacaggctgcacgagacctccaaggagcctgacgtgtccctgggctccacctggctgagcgacttccctcaggcctgggccgagacaggggggatggggctggccgtgcgccaggcccccctgatcatcccactgaaggccactagcaccccagtgagcatcaagcagtaccccatgagccaggaggcccgcctgggcatcaagccccatatccagaggctgctggaccagggcatcctggtgccctgccagagcccctggaacacccccctgctgcccgtgaagaagcccgggaccaacgactacaggcccgtgcaggatctgcgcgaggtgaacaagagggtggaggacatccaccccaccgtgccaaatccttacaacctgctgagcgggctgccccccagccaccagtggtacaccgtgctggacctgaaggacgccttcttctgcctgcggctgcaccccaccagccagcctctgttcgccttcgaatggagggatcccgagatggggatcagcgggcagctgacctggacccggctgccccagggcttcaagaacagccccaccctgttcaatgaggccctgcaccgggacctggccgacttcaggatccagcaccccgacctgatcctcctgcagtacgtggacgacctgctgctggcagccaccagcgagctggactgccagcagggcaccagagccctgctgcagaccctgggcaacctggggtacagggcctctgccaagaaggcccagatctgccagaagcaggtgaagtacctgggctacctgctgaaggagggtcagcggtggctgacagaggccaggaaggagaccgtgatgggccagcctaccccaaagacccccaggcagctgagggagtttctggggaaggctggcttttgcaggctgttcatccccggcttcgccgagatggcagcccccctgtaccctctgaccaagccgggcaccctgttcaactggggccccgaccagcagaaggcctatcaggagatcaagcaggccctgctgaccgccccagccctgggcctgcctgacctgaccaagcccttcgagctgttcgtggacgagaagcagggctacgccaagggcgtgctgacccagaagctgggcccttggcggaggcccgtggcctacctgtccaagaagctggaccccgtggcagccggctggcctccttgtctgcgcatggtggccgccatcgccgtgctgaccaaggacgccggcaagctgaccatgggccagcctctggtcatcctggccccacacgccgtggaggccctggtgaagcagccacctgacaggtggctgtccaacgccaggatgacccactaccaggccctgcttctcgacaccgacagggtgcagttcggccccgtggtggccctgaaccccgccactctgctgcccctgcccgaggagggcctgcagcacaactgcctggacatcctggcagaggcccacggcaccaggcccgacctgaccgaccagcctctgccagatgccgaccacacctggtacaccgacggcagcagcctgctgcaggaggggcagcggaaggccggggccgccgtgaccaccgagaccgaggtgatctgggccaaggccctgcccgccgggacctccgcccagagggccgagctgatcgccctgacccaggccctgaagatggccgagggcaagaagctgaatgtgtacacagacagccgctatgccttcgccactgcccacatccacggcgagatctaccgccggaggggctggctgaccagcgagggcaaggagatcaagaacaaggacgagatccttgccctgctgaaggccctgttcctgcccaagcggctgtccatcatccattgccccgggcaccagaagggccactccgctgaggcccggggcaataggatggcggaccaggccgccaggaaggccgccatcaccgagacccccgacaccagcaccctgctgatcgagaacagcagcccctccggcggcagcaagaggaccgccgacgggagcgagttcgagcccaagaagaagaggaaagtctaa

SEQ ID NO: 549 - RNA, 2196 nt, synthetic construct
  misc_feature 1..2196: note = Description of Artificial Sequence: Synthetic polynucleotide
  source 1..2196: mol_type = other RNA
agcggcggctctagcggcgggagcagcggctccgagacccccggcacctccgagtccgctactcccgagagctccggcggctccagcggcgggtctagcactctgaacatcgaggacgagtaccggctgcacgagaccagcaaggagcccgacgtgagcctgggcagcacctggctgtccgacttcccccaggcctgggccgagaccggcggcatgggcctggccgtgaggcaggcccctctgatcatccccctgaaggccaccagcacccctgtgtcaatcaagcagtaccccatgtcccaggaggctcggctgggcatcaagccccacatccagcggctgctggatcagggcatcctggtgccctgccagagcccctggaacaccccactgctgccagtgaagaagcctggcaccaatgactacaggcccgtgcaggacctcagggaggtgaacaagagggtggaggacatccaccctaccgtgcccaacccctacaacctgctgagcggcctgcctcccagccaccagtggtacaccgtgctggacctgaaggacgccttcttctgcctgaggctgcaccccaccagccagcccctgttcgccttcgagtggagagacccagagatggggatctccgggcagctgacctggacccggctgccccagggcttcaagaacagccccaccctgttcaatgaggccctgcacagggacctggctgacttcaggatccagcaccccgacctgatcctgctgcagtacgtggacgacctgctgctggcagccaccagtgagctggactgccagcagggcaccagagccctgctgcagaccctggggaatctgggctatcgggccagcgccaagaaggcccagatttgccagaagcaggtgaagtacctgggctacctgctgaaggaggggcagcggtggctcaccgaggccaggaaggagacagtgatgggccagcctaccccaaagacccccaggcagctgcgggagtttctggggaaggctggcttctgtcggctgtttattcctggcttcgctgagatggctgcccctctgtaccccctgaccaagcctggcaccctgttcaactggggccccgaccagcagaaggcctatcaggagatcaagcaggccctgctgaccgccccagccctgggcctgcctgacctgaccaagcccttcgagctgttcgtggacgagaagcagggctatgccaagggggtgctgacccagaagctgggcccttggaggaggcccgtggcctacctgtccaagaagctggaccccgtggcagccggctggcctccttgtctgcgcatggtggccgccatcgccgtgctgaccaaggacgccggcaagctgaccatgggccagcccctggtcatcctggccccacacgccgtggaggccctggtgaagcagccacccgaccggtggctgtccaacgccaggatgacccactaccaggccctgcttctggacaccgacagggtgcagttcggccctgtggtggccctgaaccccgccaccctgctgcccctccccgaggaggggctgcagcacaactgcctggacatcctggccgaggcccacggcaccaggcctgatctgaccgatcagcccctgcctgatgccgaccacacctggtacaccgacggctccagccttctgcaggagggccagcggaaggccggagccgcggtgaccaccgagaccgaggtgatctgggccaaggccctgcctgccgggaccagcgcccagagggccgagctgatcgccctgacccaggccctgaagatggccgagggcaagaagctgaacgtgtacaccgacagccggtacgcgttcgccaccgcccacatccacggcgagatctacaggcggcggggatggctgaccagcgagggcaaggagatcaagaacaaggacgagatccttgccctgctgaaggccctgttcctgcccaagcgcctgtccatcattcattgccccggccatcagaagggccactcagcagaggccagggggaacaggatggccgaccaggccgcccggaaggccgccatcacagagacccccgacactagcaccctgctgatcgagaacagcagccctagcgggggctctaagcggaccgccgacggcagcgagttcgagcccaagaagaagaggaaagtctaa

SEQ ID NO: 550 - RNA, 2196 nt, synthetic construct
  misc_feature 1..2196: note = Description of Artificial Sequence: Synthetic polynucleotide
  source 1..2196: mol_type = other RNA
tccggcggctcctcaggcggctcctctggcagcgagactcctggcaccagcgagtccgccacccccgagagcagcggcggcagctccgggggctccagcaccctgaacatcgaggacgagtacaggctgcacgagaccagcaaggagcccgacgtgagcctggggagcacctggctgtctgacttccctcaggcctgggccgagaccggggggatgggcctggccgtgcgccaggcccccctgatcatccccctgaaggccaccagcacccctgtgtccatcaagcagtaccccatgtcccaggaggctcggctgggcatcaagccccacatccagcggctgctggatcaggggatcctggtgccctgccagagcccctggaacaccccactgctgcccgtgaagaagcccgggaccaacgactacaggcccgtgcaggacctgagggaggtcaacaagagggtggaggacatccaccctaccgtgccaaacccctacaacctgctgtctgggctgccgcccagccaccagtggtacaccgtgctggacctgaaggacgccttcttctgcctgcggctgcaccccacctctcagcctctcttcgccttcgagtggagagaccctgagatggggatcagcgggcagctgacctggactcggctgccccagggcttcaagaacagccccaccctgttcaatgaggccctgcacagggacctggccgacttcaggatccagcaccccgacttgatcctgctgcagtacgtggacgacctgctgctggccgccaccagcgagctggactgccagcagggcaccagagccctgctgcagaccctggggaatctgggctatcgggccagcgccaagaaggcccagatttgccagaagcaggtcaagtacctgggctatctgctgaaggaggggcagcgctggctcaccgaggcccggaaggagaccgtgatgggccagcctaccccaaagactccccggcagctgcgggagtttctggggaaggccggcttctgccggctgttcatcccaggctttgcagagatggcagcccccctgtaccctctgacaaagcctgggaccctgttcaactggggccccgaccagcagaaggcctaccaggagatcaagcaggccctgctgaccgccccagccctgggcctgcctgatctgaccaagccattcgagctgtttgtggacgagaagcagggctacgccaagggcgtgctgacccagaagctgggcccttggcggaggcccgtggcctacctgtccaagaagctggaccccgtggcagccggctggcctccttgtctgcgcatggtggccgccatcgctgtgctgaccaaggacgccggcaagctgaccatgggccagcctctggtcatcctggcccctcacgccgtggaggctctggtgaagcagcctcccgacagatggctgagcaacgccaggatgacccactaccaggccctgcttctggacacagacagggtgcagttcggcccagtggtggccctgaacccggccaccctgctgcctctgccagaggagggcctgcagcacaactgcctggacattctggcagaggcccacggcacccggcctgacctgaccgaccagcccctgcccgacgctgaccacacctggtacaccgacggcagcagcctgctgcaggagggtcagaggaaggccggggccgccgtgaccaccgagaccgaggtgatctgggccaaggccctgcctgcagggacctccgcccagagggccgagctgatcgccctgacccaggccctgaagatggccgagggcaagaagctgaatgtgtacaccgatagcaggtacgcattcgccaccgcccacatccacggcgagatctacaggcgcaggggctggctgaccagcgagggcaaggagatcaagaacaaggacgagatcctggccctgctgaaggccctgttcctgcccaagcgcctgtccatcatccactgccccggccatcagaagggccacagtgccgaggcccgggggaatcggatggccgaccaggccgccaggaaggccgccatcaccgagacccccgacaccagcaccctgctgatcgagaactcctctcccagcggcggctccaagaggaccgccgatgggagcgagttcgagcccaagaagaagaggaaagtctaa

SEQ ID NO: 551 - RNA, 2196 nt, synthetic construct
  misc_feature 1..2196: note = Description of Artificial Sequence: Synthetic polynucleotide
  source 1..2196: mol_type = other RNA
agcgggggcagctctggcggctcttctggcagcgagacccctggcaccagcgagagcgccaccccagagagcagtggcggctcctctggaggctccagcaccctgaacatcgaggacgagtacaggctgcacgagacctccaaggagcccgacgtgtctctggggtccacctggctgtccgacttcccgcaggcctgggcagagaccggtggcatgggcctggccgtgcgccaggcccccctgatcatcccactgaaggccaccagcaccccggtgtccatcaagcagtaccccatgtcccaggaggctcggctgggcatcaagccccacatccagcggctgctggatcaggggatcctggtgccctgccagagcccctggaacacccccctgctgccagtgaagaagccagggaccaatgactaccggcctgtgcaggacctgcgggaggtcaacaagagggtggaggacatccaccctaccgtgcccaacccctacaacctgctgagcgggctgccccccagccaccagtggtacaccgtgctggacctgaaggatgcctttttctgtctgcggctgcatccaaccagccagccgctgtttgccttcgagtggagagatcccgagatgggcatcagcggccagctgacctggacccggctgccccagggcttcaagaacagccccaccctgttcaatgaggccctgcacagagacctggcagacttcaggatccagcaccctgacctgatcctgctgcagtacgtggacgacctgctgctggccgccacctctgagctcgactgtcagcagggcacccgggccctgctgcagactctgggcaatctgggctacagggccagcgccaagaaggcccagatctgccagaagcaggtgaagtacctgggctacctgctgaaggagggccagaggtggctgaccgaggcccggaaggagaccgtgatgggccagcccacccccaagacccccaggcagctgagggagttcttggggaaggccggcttctgcaggttgttcatccccggcttcgccgagatggccgcccctctgtaccccctgaccaagcctggcaccctgttcaactggggccccgaccagcagaaggcctaccaggagatcaagcaggccctgctgaccgccccagccctgggcctgcctgatctcaccaagcccttcgagctgttcgtggacgagaagcagggctatgccaagggggtgctgacccagaagctggggccatggaggcggccggtggcctacctgtccaagaagctggaccccgtggccgccggctggcctccatgcctgcggatggtggccgccatcgccgtgctgaccaaggacgccgggaagctgaccatgggtcagcccctggtgatcctggccccacacgccgtggaggccctggtcaagcagccacccgacaggtggctgagcaacgccaggatgacccactaccaggccctgctgctggacaccgacagggtgcagttcgggccagtggtggccctgaaccccgccaccctgctgcccctgcccgaggaggggctgcagcacaactgcctggacatcctggccgaggctcacggcaccaggcccgacctgacagaccagcccctgcccgacgccgaccacacctggtacaccgacggcagcagcctgctgcaggagggccagaggaaggccggcgccgccgtgaccaccgagaccgaggtgatctgggccaaggccctgcccgccggcaccagcgcccagcgggcagagctgattgccctcacccaggccctgaagatggccgagggcaagaagctgaacgtgtacactgacagcaggtacgcgttcgccaccgcccacatccacggcgagatctaccggcgcaggggctggctgaccagcgagggcaaggagatcaagaacaaggatgagatcctggccctgctgaaggccctgttcctgcccaagcggctgagcatcattcactgccctgggcaccagaagggccactctgctgaggccaggggcaatcggatggccgaccaggccgccaggaaggccgccatcaccgagacccctgacaccagcaccctgctgatcgagaactcctccccaagcggcggctccaagaggaccgccgacgggagcgagttcgagcccaagaagaagaggaaagtctaa

SEQ ID NO: 552 - RNA, 2196 nt, synthetic construct
  misc_feature 1..2196: note = Description of Artificial Sequence: Synthetic polynucleotide
  source 1..2196: mol_type = other RNA
agcggtggctcttcagggggatccagtggcagcgagacacccggcacctctgagtctgctacccccgagagctccggcgggagctccgggggtagcagcaccctgaacatcgaggacgagtacaggctgcacgagaccagcaaggagccggacgtgtctctgggcagcacctggctgtccgacttcccccaggcctgggccgagaccggcggcatggggctggccgtgcgccaggctccactgatcatccccctgaaggccaccagcacccctgtgtccatcaaacagtaccctatgtcccaggaggccaggctgggcatcaagccccacatccagcggctgctggaccaggggattctggtgccctgccagagcccctggaacaccccactgctgcctgtgaagaagcctggcaccaacgactataggcctgtgcaggacctgagggaggtgaacaagagggtggaggacatccaccctactgtgcctaacccttacaacctgctgtccggcctgccccccagccaccagtggtacacagtgctggacctgaaggacgccttcttctgcctgcggctgcaccccaccagccagcctctgttcgccttcgagtggagggacccagagatgggcatcagcggccagctgacctggaccaggctgccccagggcttcaagaacagccccacgctgttcaacgaggccctgcacagggacctggccgactttcggatccagcaccctgacctgatcctgctgcagtacgtggacgacctgctgctggccgccaccagcgagctggactgccagcagggcaccagagccctgctgcagaccctgggcaacctgggctacagggcctccgccaagaaggcccagatctgccagaagcaggtgaagtacctgggctacctgctgaaggagggacagaggtggctgaccgaggccaggaaggagaccgtgatggggcagcccacccccaagacccccaggcagctgcgggagttcctggggaaggccggcttctgccggctcttcattcctggcttcgccgagatggcagcccctctgtaccctctgaccaagcccgggaccctgttcaactgggggcccgaccagcagaaggcctaccaggagatcaagcaggccctgctgaccgccccagccctgggcctgcctgatctcaccaagcccttcgagctgttcgtggacgagaagcagggctacgccaagggcgtgctgacccagaagctgggcccttggcggaggcccgtggcctacctgagcaagaagctggaccccgtggcagccggctggcctccttgtctgcgcatggtggccgccatcgccgtgctgaccaaggacgccggcaagctgaccatgggccagcctctggtcatcctggccccacacgccgtggaggccctggtgaagcagccacctgacaggtggctgtccaacgccaggatgacccactaccaggccctgctgctggacaccgacagggtgcagttcggccccgtggtggccctgaaccccgccaccctgctgcccctccccgaggaggggctgcagcacaactgcctggacatcctggcagaggcccacggcacccggcctgacctgaccgaccagcccctgcccgacgccgaccacacctggtacaccgacggcagcagcctgctgcaggagggtcagaggaaggccggggccgccgtgaccaccgagaccgaggtgatctgggccaaggccctgcccgccgggacctccgcccagagggccgagctgatcgccctgacccaggccctgaagatggccgagggcaagaagctgaacgtgtacaccgacagccggtacgccttcgccaccgcccacatccacggcgagatctatcgccggagggggtggctgaccagcgagggcaaggagatcaagaacaaggatgagatcctggccctgctgaaggccctgttcctgcctaagaggctgagcatcatccactgccccggccatcagaagggccacagcgcagaggcaagggggaaccggatggccgaccaggccgcccggaaggccgccatcactgagacccccgacacctccactcttctgatcgagaactcctcccccagcggcggctccaagaggaccgccgacgggagcgagttcgagcccaagaagaagaggaaagtctaa

SEQ ID NO: 553 - RNA, 2196 nt, synthetic construct
  misc_feature 1..2196: note = Description of Artificial Sequence: Synthetic polynucleotide
  source 1..2196: mol_type = other RNA
tccggggggagcagcggggggagttccgggagcgagactcccgggactagcgagagcgccacccccgagagcagcgggggcagctctggaggctccagcaccctgaacatcgaggacgagtacaggctgcacgagacctccaaggagcccgacgtgagtctgggctccacctggctgtctgacttcccccaggcctgggccgagaccggcggcatgggcctggccgtcagacaggcccccctgatcatccccctgaaggccacctccacccccgtgtccatcaagcagtaccccatgtcccaggaggctcggctgggcatcaagccccacatccagcggctgctggatcaggggatcctggtgccctgccagagcccctggaacacccccctgctgcccgtgaagaagcccgggaccaacgactacaggcccgtgcaggacctgcgggaggtgaataagagggtggaggacatccaccctaccgtgcctaacccctacaacctgctgagcgggctgccccccagccaccagtggtacaccgtgctggacctgaaggacgcctttttctgtctgaggctgcaccccaccagccagcctctgttcgccttcgagtggcgggatcccgagatggggatcagcgggcagctgacctggacccggctgccccagggcttcaagaacagccccaccctgttcaatgaggccctgcacagagacctggcggacttcaggatccagcacccagatctgattctgctgcagtacgtggacgacctgctgctggccgccacctctgagctggactgccagcagggcaccagagccctgctgcagaccctggggaatctgggctatcgggccagcgccaagaaggcccagatttgccagaagcaggtgaagtacctgggctacctgctgaaggagggccagaggtggctgaccgaggccaggaaggagaccgtgatgggccagcctaccccaaagacccctcggcagctgagggagtttctggggaaggctggcttctgccggctcttcattcctggcttcgccgagatggccgccccactgtaccccctgaccaagccagggaccctgttcaactggggccccgaccagcagaaggcctaccaggagatcaagcaggccctgctgaccgccccagccctgggcctgcctgatctgaccaagcccttcgagctgttcgtggacgagaagcagggctacgccaagggcgtgctgacccagaagctgggcccatggcggcggccagtggcctacctgtccaagaagctggaccccgtggccgctggctggccaccatgcctgcgcatggtggccgccatcgccgtgctgaccaaggacgccggcaagctgaccatgggccagcctctggtgatcctggccccacacgccgtggaggccctggtgaagcagccacctgacaggtggctgtccaacgccaggatgacccactatcaggccctgctgctcgacaccgacagggtgcagttcggccccgtggtggccctgaaccccgccaccctgctgcccctgcctgaggaggggctgcagcacaactgcctggacatcctggcagaggcccacggcaccaggccggacctgaccgatcagcccctgcctgatgccgaccacacctggtacaccgacggcagctccctcctgcaggaggggcagcggaaggccggggccgccgtgaccaccgagaccgaggtgatctgggccaaggccctgcccgcagggacctccgcccagagggccgagctgatcgccctgacccaggccctgaagatggccgagggcaagaagctgaacgtgtacaccgacagccggtacgcgttcgccaccgcccacatccacggcgagatctacaggcgcaggggctggctgaccagcgagggcaaggagatcaagaacaaggatgagatcctggccctgctgaaggccctgttcctgcccaagcgcctgtccatcatccactgccccggccatcagaagggccactctgctgaggctcgggggaatcggatggccgaccaggccgccagaaaggccgccatcaccgagacccccgacaccagcaccctgctgatcgagaacagcagcccctccgggggcagcaagaggaccgctgacggcagcgagttcgagcccaagaagaagaggaaagtctaa

SEQ ID NO: 554 - RNA, 2196 nt, synthetic construct
  misc_feature 1..2196: note = Description of Artificial Sequence: Synthetic polynucleotide
  source 1..2196: mol_type = other RNA
agcggggggtcctcagggggcagctcaggctctgagacccccggcaccagcgagagtgctaccccagagagcagcgggggctcctctggaggctccagcaccctgaacatcgaggacgagtacaggctgcacgagacctccaaggagcccgacgtgtctctggggagcacctggctgtccgacttccctcaggcctgggctgagaccggaggcatgggcctggccgtgcgccaggcccctctgatcatccccctgaaggccaccagcacccccgtgagcatcaagcagtaccctatgagccaggaggccaggctgggcatcaagccccacatccagcggctgctggaccagggcatcctggtgccctgccagagcccctggaacaccccactgctgccagtgaagaagcctggcaccaacgactacaggccggtgcaggacctgagggaggtgaacaagagggtggaggacatccaccctactgttcccaatccctacaacctgctgtccggcctgcctcctagccatcagtggtacaccgtgctggacctgaaggatgccttcttctgcctgcggctgcaccccaccagccagcctctgttcgccttcgaatggagggacccagagatgggcatcagcgggcagctgacctggacccggctgccccagggcttcaagaacagccccaccctgttcaatgaggccctgcaccgggacctggccgacttcaggatccagcacccagatctgatcctgctgcagtacgtggacgacctgctgctggccgccaccagcgagctggactgccagcagggcaccagagccctgctgcagaccctggggaatctgggctatcgggccagcgccaagaaggcccagatttgccagaagcaggtgaagtatctggggtacctgctgaaggaggggcagcggtggctgaccgaggcacggaaggagaccgtgatgggccagcccacccccaagacccccaggcagctgcgggagttcctggggaaggccggcttctgccggctgttcatccccggcttcgccgagatggctgcccctctgtacccactgaccaagccggggaccctgttcaactggggccccgaccagcagaaggcctatcaggagatcaagcaggccctgctgaccgccccagccctgggcctgcctgacctgaccaagcccttcgagctgttcgtggacgagaagcagggctacgccaagggcgtgctgacccagaagctgggcccttggcggcggccagtggcctacctgtccaagaagctggaccccgtggccgctggctggcctccatgcctgcggatggtggccgccatcgccgtgctgaccaaggacgctggcaagctgaccatgggccagcccctggtgatcctggccccacacgccgtggaggccctggtgaagcagccacccgacaggtggctgtccaacgccaggatgacccactaccaggccctgctgctcgacaccgacagggtgcagttcggcccagtggtggccctgaaccccgccaccctgctgcccctgcccgaggagggcctgcagcacaactgcctggacatcctggccgaggcccacggcaccaggcccgacctgaccgaccagcctctgccagatgccgaccacacctggtacaccgacggcagcagcctgctgcaggaggggcagcggaaggcaggcgccgccgtgaccaccgagaccgaggtgatctgggccaaggccctgcctgctgggaccagcgcccagcgggccgagctgatcgccctgacccaggccctgaagatggccgagggcaagaagctgaacgtgtacaccgacagccggtacgcgttcgccaccgcccacatccacggcgagatctacaggcgcaggggctggctgaccagcgagggcaaggagatcaagaacaaggatgagatccttgccctgctgaaggccctgttcctgcccaagcgcctgtccatcatccactgccccggccatcagaagggccacagcgcagaggcaagggggaaccggatggccgaccaggccgcccggaaggccgccatcactgagacccccgacacctccaccctgctgatcgagaacagcagccccagcggcgggagcaagcgcaccgccgacggctccgagttcgagcccaagaagaagaggaaagtctaa

SEQ ID NO: 555 - RNA, 2196 nt, synthetic construct
  misc_feature 1..2196: note = Description of Artificial Sequence: Synthetic polynucleotide
  source 1..2196: mol_type = other RNA
tccggggggagcagcgggggcagctccggcagcgagacccccggaacctctgagagcgccactccagagagttccggcgggtccagcggcgggagcagcaccctgaacatcgaggacgagtacaggctgcacgagaccagcaaggagcccgacgtgagtctgggctccacctggctgtctgacttcccccaggcctgggccgagaccggcggcatgggcctggccgtcaggcaggcccccctgatcatccccctgaaggccaccagcaccccagtgtccatcaagcagtaccctatgtcacaggaggccaggctgggcatcaagccccacatccagagactgctggaccagggcatcctggtgccctgccagagtccctggaacacccccctgctgcccgtgaagaagcctggcaccaatgactataggcctgtgcaggacctgcgggaggtgaacaagagggtggaggacatccaccctactgtgcctaacccctacaacctgctgagtggcctgccccccagccaccagtggtacaccgtgctggacctgaaggacgcctttttctgtctgcggctgcaccccacctctcagcctctcttcgccttcgagtggagagaccctgagatggggatcagcgggcagctgacctggacccggctgccccagggcttcaagaacagccccaccctgttcaatgaggccctgcacagagacctggccgacttcaggatccagcaccccgacctgatcctgctgcagtacgtggacgacctgctgctggccgccactagtgagctggactgccagcagggcaccagggccctgctgcagaccctgggcaacctggggtacagggcctctgccaagaaggcccagatctgccagaagcaggtcaagtacctgggctacctgctgaaggagggtcagcggtggctgaccgaggcccgcaaggagaccgtgatgggccagcccacccccaagacccccaggcagctcagggagtttctgggcaaggccggcttctgccggctgttcatccccggcttcgccgagatggcagcccccctgtaccccctgaccaagcctgggaccctgttcaactggggcccagaccagcagaaggcctatcaggagatcaagcaggccctgctgaccgccccagccctgggcctgcctgacctgaccaagcccttcgagctgttcgtggacgagaagcaggggtacgccaagggggtgctgacccagaagctgggcccctggcgcaggccagtggcctacctgtccaagaagctggacccagtggcagcagggtggccaccatgcctgcgcatggtggccgccatcgccgtgctgaccaaggacgccgggaagctgaccatggggcagcccctggtgatcctggccccacacgccgtggaggccctggtgaagcagccgcctgataggtggctgtccaacgccaggatgacccactatcaggccctgctgctggacaccgacagggtgcagttcggccccgtggtggccctgaaccccgccaccctgctgccactgcctgaggaggggctgcagcacaactgcctggacattctggccgaggcccacggcactcggccagatctgaccgatcagcctctgcccgatgccgaccacacctggtataccgacggcagcagcctgctgcaggaggggcagaggaaggccggcgccgccgtgaccaccgagaccgaggtgatctgggccaaggccctgcccgccggcacctctgcccagcgggcagagctgatcgccctgactcaggccctgaagatggccgagggcaagaagctgaatgtgtacaccgacagccgctacgccttcgccaccgcccacatccacggcgagatctacaggcggcggggatggctgaccagcgagggcaaggagatcaagaacaaggacgagatcctggccctgctgaaggccctgttcctgcccaagcggctgtccatcattcattgccccggccatcagaagggccactccgctgaggccagggggaacaggatggccgaccaggccgcccgcaaggccgccatcaccgagacccccgataccagcaccctgctgatcgagaactcctctcccagcggcggctccaagaggaccgccgatgggagcgagttcgagcccaagaagaagaggaaagtctaa

SEQ ID NO: 556 - RNA, 76 nt, synthetic construct
  misc_feature 1..76: note = Description of Artificial Sequence: Synthetic polynucleotide
  source 1..76: mol_type = other RNA
gtttgagagctagaaatagcaagtttaaataaggctagtccgttatcaacttgaaaaagtgggaccgagtcggtcc

SEQ ID NO: 557 - RNA, 86 nt, synthetic construct
  misc_feature 1..86: note = Description of Artificial Sequence: Synthetic polynucleotide
  source 1..86: mol_type = other RNA
gtttaagagctatgctggaaacagcatagcaagtttaaataaggctagtccgttatcaacttgaaaaagtggcaccgagtcggtgc

SEQ ID NO: 558 - RNA, 76 nt, synthetic construct
  misc_feature 1..76: note = Description of Artificial Sequence: Synthetic polynucleotide
  source 1..76: mol_type = other RNA
gttttagagctagaaatagcaagttaaaataaggctagtccgttatcaacttgaaaaagtggcaccgagtcggtgc

SEQ ID NO: 559 - RNA, 127 nt, synthetic construct
  misc_feature 1..127: note = Description of Artificial Sequence: Synthetic polynucleotide
  modified_base 1..3: mod_base = OTHER; note = 2'-O-methyl nucleotide
  modified_base 1..4: mod_base = OTHER; note = Phosphorothioate linkage
  modified_base 124..126: mod_base = OTHER; note = 2'-O-methyl nucleotide
  modified_base 124..127: mod_base = OTHER; note = Phosphorothioate linkage
  source 1..127: mol_type = other RNA
catggtgcacctgactcctggttttagagctagaaatagcaagttaaaataaggctagtccgttatcaacttgaaaaagtgggaccgagtcggtgcagacttctccacaggagtcaggtgcactttt

SEQ ID NO: 560 - RNA, 127 nt, synthetic construct; identical to SEQ ID NO: 559
  misc_feature 1..127: note = Description of Artificial Sequence: Synthetic polynucleotide
  source 1..127: mol_type = other RNA

SEQ ID NO: 561 - RNA, 123 nt, synthetic construct
  misc_feature 1..123: note = Description of Artificial Sequence: Synthetic polynucleotide
  modified_base 1..3: mod_base = OTHER; note = 2'-O-methyl nucleotide
  modified_base 1..4: mod_base = OTHER; note = Phosphorothioate linkage
  source 1..123: mol_type = other RNA
catggtgcacctgactcctggttttagagctagaaatagcaagttaaaataaggctagtccgttatcaacttgaaaaagtgggaccgagtcggtgcagacttctccacaggagtcaggtgcac

SEQ ID NO: 562 - RNA, 123 nt, synthetic construct; identical to SEQ ID NO: 561
  misc_feature 1..123: note = Description of Artificial Sequence: Synthetic polynucleotide
  modified_base 1..3: mod_base = OTHER; note = 2'-O-methyl nucleotide
  modified_base 1..4: mod_base = OTHER; note = Phosphorothioate linkage
  modified_base 121..123: mod_base = OTHER; note = 2'-O-methyl nucleotide
  modified_base 121..123: mod_base = OTHER; note = Phosphorothioate linkage
  source 1..123: mol_type = other RNA

SEQ ID NO: 563 - RNA, 123 nt, synthetic construct; identical to SEQ ID NO: 561
  misc_feature 1..123: note = Description of Artificial Sequence: Synthetic polynucleotide
  source 1..123: mol_type = other RNA

SEQ ID NO: 564 - RNA, 100 nt, synthetic construct
  misc_feature 1..100: note = Description of Artificial Sequence: Synthetic polynucleotide
  modified_base 1..3: mod_base = OTHER; note = 2'-O-methyl nucleotide
  modified_base 1..4: mod_base = OTHER; note = Phosphorothioate linkage
  modified_base 97..99: mod_base = OTHER; note = 2'-O-methyl nucleotide
  modified_base 97..100: mod_base = OTHER; note = Phosphorothioate linkage
  source 1..100: mol_type = other RNA
ccttgataccaacctgcccagttttagagctagaaatagcaagttaaaataaggctagtccgttatcaacttgaaaaagtgggaccgagtcggtgctttt

SEQ ID NO: 565 - RNA, 100 nt, synthetic construct; identical to SEQ ID NO: 564
  misc_feature 1..100: note = Description of Artificial Sequence: Synthetic polynucleotide
  source 1..100: mol_type = other RNA

SEQ ID NO: 566 - RNA, 96 nt, synthetic construct
  misc_feature 1..96: note = Description of Artificial Sequence: Synthetic polynucleotide
  modified_base 1..3: mod_base = OTHER; note = 2'-O-methyl nucleotide
  modified_base 1..4: mod_base = OTHER; note = Phosphorothioate linkage
  source 1..96: mol_type = other RNA
ccttgataccaacctgcccagttttagagctagaaatagcaagttaaaataaggctagtccgttatcaacttgaaaaagtgggaccgagtcggtgc

SEQ ID NO: 567 - RNA, 96 nt, synthetic construct; identical to SEQ ID NO: 566
  misc_feature 1..96: note = Description of Artificial Sequence: Synthetic polynucleotide
  modified_base 1..3: mod_base = OTHER; note = 2'-O-methyl nucleotide
  modified_base 1..4: mod_base = OTHER; note = Phosphorothioate linkage
  modified_base 94..96: mod_base = OTHER; note = 2'-O-methyl nucleotide
  modified_base 94..96: mod_base = OTHER; note = Phosphorothioate linkage
  source 1..96: mol_type = other RNA

SEQ ID NO: 568 - RNA, 96 nt, synthetic construct; identical to SEQ ID NO: 566
  misc_feature 1..96: note = Description of Artificial Sequence: Synthetic polynucleotide
  source 1..96: mol_type = other RNA

SEQ ID NO: 569 - RNA, 127 nt, synthetic construct
  misc_feature 1..127: note = Description of Artificial Sequence: Synthetic polynucleotide
  modified_base 1..3: mod_base = OTHER; note = 2'-O-methyl nucleotide
  modified_base 1..4: mod_base = OTHER; note = Phosphorothioate linkage
  modified_base 124..126: mod_base = OTHER; note = 2'-O-methyl nucleotide
  modified_base 124..127: mod_base = OTHER; note = Phosphorothioate linkage
  source 1..127: mol_type = other RNA
catggtgcacctgactcctggttttagagctagaaatagcaagttaaaataaggctagtccgttatcaacttgaaaaagtggcaccgagtcggtgcagacttctcttcaggagtcaggtgcactttt

SEQ ID NO: 570 - RNA, 127 nt, synthetic construct; identical to SEQ ID NO: 569
  misc_feature 1..127: note = Description of Artificial Sequence: Synthetic polynucleotide
  source 1..127: mol_type = other RNA

SEQ ID NO: 571 - RNA, 123 nt, synthetic construct
  misc_feature 1..123: note = Description of Artificial Sequence: Synthetic polynucleotide
  modified_base 1..3: mod_base = OTHER; note = 2'-O-methyl nucleotide
  modified_base 1..4: mod_base = OTHER; note = Phosphorothioate linkage
  source 1..123: mol_type = other RNA
catggtgcacctgactcctggttttagagctagaaatagcaagttaaaataaggctagtccgttatcaacttgaaaaagtggcaccgagtcggtgcagacttctcttcaggagtcaggtgcac

SEQ ID NO: 572 - RNA, 123 nt, synthetic construct; identical to SEQ ID NO: 571
  misc_feature 1..123: note = Description of Artificial Sequence: Synthetic polynucleotide
  modified_base 1..3: mod_base = OTHER; note = 2'-O-methyl nucleotide
  modified_base 1..4: mod_base = OTHER; note = Phosphorothioate linkage
  modified_base 121..123: mod_base = OTHER; note = 2'-O-methyl nucleotide
  modified_base 121..123: mod_base = OTHER; note = Phosphorothioate linkage
  source 1..123: mol_type = other RNA

SEQ ID NO: 573 - RNA, 123 nt, synthetic construct; identical to SEQ ID NO: 571
  misc_feature 1..123: note = Description of Artificial Sequence: Synthetic polynucleotide
  source 1..123: mol_type = other RNA

SEQ ID NO: 574 - RNA, 100 nt, synthetic construct
  misc_feature 1..100: note = Description of Artificial Sequence: Synthetic polynucleotide
  modified_base 1..3: mod_base = OTHER; note = 2'-O-methyl nucleotide
  modified_base 1..4: mod_base = OTHER; note = Phosphorothioate linkage
  modified_base 97..99: mod_base = OTHER; note = 2'-O-methyl nucleotide
  modified_base 97..100: mod_base = OTHER; note = Phosphorothioate linkage
  source 1..100: mol_type = other RNA
ccttgataccaacctgcccagttttagagctagaaatagcaagttaaaataaggctagtccgttatcaacttgaaaaagtggcaccgagtcggtgctttt

SEQ ID NO: 575 - RNA, 100 nt, synthetic construct; identical to SEQ ID NO: 574
  misc_feature 1..100: note = Description of Artificial Sequence: Synthetic polynucleotide
  source 1..100: mol_type = other RNA

SEQ ID NO: 576 - RNA, 96 nt, synthetic construct
  misc_feature 1..96: note = Description of Artificial Sequence: Synthetic polynucleotide
  modified_base 1..3: mod_base = OTHER; note = 2'-O-methyl nucleotide
  modified_base 1..4: mod_base = OTHER; note = Phosphorothioate linkage
  source 1..96: mol_type = other RNA
ccttgataccaacctgcccagttttagagctagaaatagcaagttaaaataaggctagtccgttatcaacttgaaaaagtggcaccgagtcggtgc

SEQ ID NO: 577 - RNA, 96 nt, synthetic construct; identical to SEQ ID NO: 576
  misc_feature 1..96: note = Description of Artificial Sequence: Synthetic polynucleotide
  modified_base 1..3: mod_base = OTHER; note = 2'-O-methyl nucleotide
  modified_base 1..4: mod_base = OTHER; note = Phosphorothioate linkage
  modified_base 94..96: mod_base = OTHER; note = 2'-O-methyl nucleotide
  modified_base 94..96: mod_base = OTHER; note = Phosphorothioate linkage
  source 1..96: mol_type = other RNA

SEQ ID NO: 578 - RNA, 96 nt, synthetic construct; identical to SEQ ID NO: 576
  misc_feature 1..96: note = Description of Artificial Sequence: Synthetic polynucleotide
  source 1..96: mol_type = other RNA

SEQ ID NO: 579 - RNA, 127 nt, synthetic construct
  misc_feature 1..127: note = Description of Artificial Sequence: Synthetic polynucleotide
  modified_base 1..3: mod_base = OTHER; note = 2'-O-methyl nucleotide
  modified_base 1..4: mod_base = OTHER; note = Phosphorothioate linkage
  modified_base 124..126: mod_base = OTHER; note = 2'-O-methyl nucleotide
  modified_base 124..127: mod_base = OTHER; note = Phosphorothioate linkage
  source 1..127: mol_type = other RNA
catggtgcacctgactcctggttttagagctagaaatagcaagttaaaataaggctagtccgttatcaacttgaaaaagtggcaccgagtcggtgcagacttctctacaggagtcaggtgcactttt

SEQ ID NO: 580 - RNA, 127 nt, synthetic construct; identical to SEQ ID NO: 579
  misc_feature 1..127: note = Description of Artificial Sequence: Synthetic polynucleotide
  source 1..127: mol_type = other RNA

SEQ ID NO: 581 - RNA, 123 nt, synthetic construct
  misc_feature 1..123: note = Description of Artificial Sequence: Synthetic polynucleotide
  modified_base 1..3: mod_base = OTHER; note = 2'-O-methyl nucleotide
  modified_base 1..4: mod_base = OTHER; note = Phosphorothioate linkage
  source 1..123: mol_type = other RNA
catggtgcacctgactcctggttttagagctagaaatagcaagttaaaataaggctagtccgttatcaacttgaaaaagtggcaccgagtcggtgcagacttctctacaggagtcaggtgcac

SEQ ID NO: 582 - RNA, 123 nt, synthetic construct; identical to SEQ ID NO: 581
  misc_feature 1..123: note = Description of Artificial Sequence: Synthetic polynucleotide
  modified_base 1..3: mod_base = OTHER; note = 2'-O-methyl nucleotide
  modified_base 1..4: mod_base = OTHER; note = Phosphorothioate linkage
  modified_base 121..123: mod_base = OTHER; note = 2'-O-methyl nucleotide
  modified_base 121..123: mod_base = OTHER; note = Phosphorothioate linkage
  source 1..123: mol_type = other RNA

SEQ ID NO: 583 - RNA, 123 nt, synthetic construct; identical to SEQ ID NO: 581
  misc_feature 1..123: note = Description of Artificial Sequence: Synthetic polynucleotide
  source 1..123: mol_type = other RNA

SEQ ID NO: 584 - DNA, 131 bp, synthetic construct
  misc_feature 1..131: note = Description of Artificial Sequence: Synthetic polynucleotide
  source 1..131: mol_type = other DNA
gcatggtgcacctgactcctggttttagagctagaaatagcaagttaaaataaggctagtccgttatcaacttgaaaaagtgggaccgagtcggtgcagacttctccacaggagtcaggtgcacttttttt

SEQ ID NO: 585 - DNA, 131 bp, synthetic construct
  misc_feature 1..131: note = Description of Artificial Sequence: Synthetic polynucleotide
  source 1..131: mol_type = other DNA
gcatggtgcacctgactcctggttttagagctagaaatagcaagttaaaataaggctagtccgttatcaacttgaaaaagtgggaccgagtcggtgcagacttctctacaggagtcaggtgcacttttttt

SEQ ID NO: 586 - DNA, 104 bp, synthetic construct
  misc_feature 1..104: note = Description of Artificial Sequence: Synthetic polynucleotide
  source 1..104: mol_type = other DNA
gccttgataccaacctgcccagttttagagctagaaatagcaagttaaaataaggctagtccgttatcaacttgaaaaagtgggaccgagtcggtgcttttttt

SEQ ID NO: 587 - RNA, 123 nt, synthetic construct; identical to SEQ ID NO: 581
  misc_feature 1..123: note = Description of Artificial Sequence: Synthetic polynucleotide
  modified_base 1..3: mod_base = OTHER; note = 2'-O-methyl nucleotide
  modified_base 1..4: mod_base = OTHER; note = Phosphorothioate linkage
  modified_base 120..122: mod_base = OTHER; note = 2'-O-methyl nucleotide
  modified_base 120..123: mod_base = OTHER; note = Phosphorothioate linkage
  source 1..123: mol_type = other RNA

SEQ ID NO: 588 - DNA, 131 bp, synthetic construct; identical to SEQ ID NO: 584
  misc_feature 1..131: note = Description of Artificial Sequence: Synthetic polynucleotide
  source 1..131: mol_type = other DNA

SEQ ID NO: 589 - DNA, 131 bp, synthetic construct; identical to SEQ ID NO: 585
  misc_feature 1..131: note = Description of Artificial Sequence: Synthetic polynucleotide
  source 1..131: mol_type = other DNA

SEQ ID NO: 590 - DNA, 104 bp, synthetic construct; identical to SEQ ID NO: 586
  misc_feature 1..104: note = Description of Artificial Sequence: Synthetic polynucleotide
  source 1..104: mol_type = other DNA

SEQ ID NO: 591 - RNA, 127 nt, synthetic construct; identical to SEQ ID NO: 579
  misc_feature 1..127: note = Description of Artificial Sequence: Synthetic polynucleotide
  modified_base 1..3: mod_base = OTHER; note = 2'-O-methyl nucleotide
  modified_base 1..4: mod_base = OTHER; note = Phosphorothioate linkage
  modified_base 124..126: mod_base = OTHER; note = 2'-O-methyl nucleotide
  modified_base 124..127: mod_base = OTHER; note = Phosphorothioate linkage
  source 1..127: mol_type = other RNA

SEQ ID NO: 592 - RNA, 6507 nt, synthetic construct
  misc_feature 1..6507: note = Description of Artificial Sequence: Synthetic polynucleotide
  source 1..6507: mol_type = other RNA
aggaaataagagagaaaagaagagtaagaagaaatataagagccaccatgaaacggacagccgacggaagcgagttcgagtcaccaaagaagaagcggaaagtcgacaagaagtacagcatcggcctggacatcggcaccaactctgtgggctgggccgtgatcaccgacgagtacaaggtgcccagcaagaaattcaaggtgctgggcaacaccgaccggcacagcatcaagaagaacctgatcggagccctgctgttcgacagcggcgaaacagccgaggccacccggctgaagagaaccgccagaagaagatacaccagacggaagaaccggatctgctatctgcaagagatcttcagcaacgagatggccaaggtggacgacagcttcttccacagactggaagagtccttcctggtggaagaggataagaagcacgagcggcaccccatcttcggcaacatcgtggacgaggtggcctaccacgagaagtaccccaccatctaccacctgagaaagaaactggtggacagcaccgacaaggccgacctgcggctgatctatctggccctggcccacatgatcaagttccggggccacttcctgatcgagggcgacctgaaccccgacaacagcgacgtggacaagctgttcatccagctggtgcagacctacaaccagctgttcgaggaaaaccccatcaacgccagcggcgtggacgccaaggccatcctgtctgccagactgagcaagagcagacggctggaaaatctgatcgcccagctgcccggcgagaagaagaatggcctgttcggaaacctgattgccctgagcctgggcctgacccccaacttcaagagcaacttcgacctggccgaggatgccaaactgcagctgagcaaggacacctacgacgacgacctggacaacctgctggcccagatcggcgaccagtacgccgacctgtttctggccgccaagaacctgtccgacgccatcctgctgagcgacatcctgagagtgaacaccgagatcaccaaggcccccctgagcgcctctatgatcaagagatacgacgagcaccaccaggacctgaccctgctgaaagctctcgtgcggcagcagctgcctgagaagtacaaagagattttcttcgaccagagcaagaacggctacgccggctacattgacggcggagccagccaggaagagttctacaagttcatcaagcccatcctggaaaagatggacggcaccgaggaactgctcgtgaagctgaacagagaggacctgctgcggaagcagcggaccttcgacaacggcagcatcccccaccagatccacctgggagagctgcacgccattctgcggcggcaggaagatttttacccattcctgaaggacaaccgggaaaagatcgagaagatcctgaccttccgcatcccctactacgtgggccctctggccaggggaaacagcagattcgcctggatgaccagaaagagcgaggaaaccatcaccccctggaacttcgaggaagtggtggacaagggcgcttccgcccagagcttcatcgagcggatgaccaacttcgataagaacctgcccaacgagaaggtgctgcccaagcacagcctgctgtacgagtacttcaccgtgtataacgagctgaccaaagtgaaatacgtgaccgagggaatgagaaagcccgccttcctgagcggcgagcagaaaaaggccatcgtggacctgctgttcaagaccaaccggaaagtgaccgtgaagcagctgaaagaggactacttcaagaaaatcgagtgcttcgactccgtggaaatctccggcgtggaagatcggttcaacgcctccctgggcacataccacgatctgctgaaaattatcaaggacaaggacttcctggacaatgaggaaaacgaggacattctggaagatatcgtgctgaccctgacactgtttgaggacagagagatgatcgaggaacggctgaaaacctatgcccacctgttcgacgacaaagtgatgaagcagctgaagcggcggagatacaccggctggggcaggctgagccggaagctgatcaacggcatccgggacaagcagtccggcaagacaatcctggatttcctgaagtccgacggcttcgccaacagaaacttcatgcagctgatccacgacgacagcctgacctttaaagaggacatccagaaagcccaggtgtccggccagggcgatagcctgcacgagcacattgccaatctggccggcagccccgccattaagaagggcatcctgcagacagtgaaggtggtggacgagctcgtgaaagtgatgggccggcacaagcccgagaacatcgtgatcgaaatggccagagagaaccagaccacccagaagggacagaagaacagccgcgagagaatgaagcggatcgaagagggcatcaaagagctgggcagccagatcctgaaagaacaccccgtggaaaacacccagctgcagaacgagaagctgtacctgtactacctgcagaatgggcgggatatgtacgtggaccaggaactggacatcaaccggctgtccgactacgatgtggacgctatcgtgcctcagagctttctgaaggacgactccatcgacaacaaggtgctgaccagaagcgacaagaaccggggcaagagcgacaacgtgccctccgaagaggtcgtgaagaagatgaagaactactggcggcagctgctgaacgccaagctgattacccagagaaagttcgacaatctgaccaaggccgagagaggcggcctgagcgaactggataaggccggcttcatcaagagacagctggtggaaacccggcagatcacaaagcacgtggcacagatcctggactcccggatgaacactaagtacgacgagaatgacaagctgatccgggaagtgaaagtgatcaccctgaagtccaagctggtgtccgatttccggaaggatttccagttttacaaagtgcgcgagatcaacaactaccaccacgcccacgacgcctacctgaacgccgtcgtgggaaccgccctgatcaaaaagtaccctaagctggaaagcgagttcgtgtacggcgactacaaggtgtacgacgtgcggaagatgatcgccaagagcgagcaggaaatcggcaaggctaccgccaagtacttcttctacagcaacatcatgaactttttcaagaccgagattaccctggccaacggcgagatccggaagcggcctctgatcgagacaaacggcgaaaccggggagatcgtgtgggataagggccgggattttgccaccgtgcggaaagtgctgagcatgccccaagtgaatatcgtgaaaaagaccgaggtgcagacaggcggcttcagcaaagagtctatcctgcccaagaggaacagcgataagctgatcgccagaaagaaggactgggaccctaagaagtacggcggcttcgacagccccaccgtggcctattctgtgctggtggtggccaaagtggaaaagggcaagtccaagaaactgaagagtgtgaaagagctgctggggatcaccatcatggaaagaagcagcttcgagaagaatcccatcgactttctggaagccaagggctacaaagaagtgaaaaaggacctgatcatcaagctgcctaagtactccctgttcgagctggaaaacggccggaagagaatgctggcctctgccggcgaactgcagaagggaaacgaactggccctgccctccaaatatgtgaacttcctgtacctggccagccactatgagaagctgaagggctcccccgaggataatgagcagaaacagctgtttgtggaacagcacaagcactacctggacgagatcatcgagcagatcagcgagttctccaagagagtgatcctggccgacgctaatctggacaaagtgctgtccgcctacaacaagcaccgggataagcccatcagagagcaggccgagaatatcatccacctgtttaccctgaccaatctgggagcccctgccgccttcaagtactttgacaccaccatcgaccggaagaggtacaccagcaccaaagaggtgctggacgccaccctgatccaccagagcatcaccggcctgtacgagacacggatcgacctgtctcagctgggaggtgactccggcggctcctccggcggaagcagcggcggcagcagcggcggaagcagcggcggcagcagcggcggaagctctggcggatctagcggcggctctaccctgaacatcgaggacgagtacaggctgcacgagaccagcaaggagcccgacgtgagcctgggcagcacctggctgagcgatttccctcaggcttgggccgagaccggcggcatgggcctggccgtgcggcaggcccccctgattatccccctgaaggccaccagcacccccgtgagcatcaagcagtacccaatgtcccaggaggccaggctgggcatcaagcctcacatccagaggctgctggaccagggcatcctggtgccatgccagtccccctggaacacccctctgctgcccgtgaagaagcctggcaccaacgactaccggcccgtgcaggacctgagagaagtgaacaagcgggtggaggacatccacccaaccgtgcccaacccttacaacctgctgtccggcctgccccccagccaccagtggtacaccgtgctggacctgaaggacgccttcttctgcctgagactgcaccccacctctcagcccctgttcgccttcgagtggcgcgaccccgagatgggcatcagcggccagctgacctggaccagactgccacagggctttaagaatagcccaaccctgtttaacgaggccctgcacagggacctggccgacttcaggatccagcaccccgacctgattctgctgcagtacgtggacgacctgctgctggccgctaccagcgagctggactgccagcagggcaccagagccctgctgcagaccctgggcaacctgggctacagagccagcgccaagaaggcccagatctgtcagaagcaggtgaagtatctgggctacctgctgaaggaaggccagagatggctgaccgaggccagaaaggagactgtgatgggccagcccacccccaagacccccaggcagctgcgggagttcctgggcaaggccggcttttgcagactgtttatccctggcttcgccgagatggccgccccactgtaccctctgaccaagcctggcaccctgtttaactggggccccgaccagcagaaggcctaccaggagatcaagcaggccctgctgaccgcccccgccctgggcctgcccgacctgaccaagcctttcgagctgttcgtggacgagaagcagggatacgccaaaggcgtgctgacccagaagctgggcccctggcggaggcccgtggcctacctgagcaaaaaactggaccctgtggccgccggctggcccccatgcctgcggatggtggccgccatcgctgtgctgaccaaggacgccggcaagctgaccatgggccagcccctggtgatcctggcccctcacgccgtggaggctctggtgaagcagcctccagacaggtggctgtccaacgccaggatgacccactaccaggccctgctgctggacaccgaccgggtgcagttcggccctgtggtggccctgaaccccgccaccctgctgcctctgccagaggagggcctgcagcacaactgcctggacatcctggccgaggcccacggcaccaggcccgacctgaccgaccagcccctgcctgacgccgaccacacctggtacaccgacggcagctccctgctgcaggagggccagaggaaggccggcgccgccgtgaccaccgagaccgaggtgatctgggccaaagccctgcctgccggcacctccgcccagcgggccgagctgatcgccctgacccaggccctgaagatggctgagggcaagaagctgaacgtgtacaccgattccagatacgccttcgccaccgcccacatccacggcgagatctacagaagaaggggctggctgacctccgagggcaaggagatcaagaacaaggacgagattctggccctgctgaaggccctgttcctgcctaagagactgagcatcatccactgtcccggccaccagaagggccacagcgccgaggccagaggcaatagaatggccgaccaggccgccagaaaggccgccatcaccgagacccccgacaccagcaccctgctgatcgagaacagcagccccagcggcggctccaaacgcaccgccgacgggagcgagttcgagcccaagaagaagaggaaagtctaagcggccgcttaattaagctgccttctgcggggcttgccttctggccaagcccttcttctctcccttgcacctgtacctcttggtctttgaataaagcctgagtaggaag

SEQ ID NO: 593 - RNA, 6513 nt, synthetic construct
  misc_feature 1..6513: note = Description of Artificial Sequence: Synthetic polynucleotide
  source 1..6513: mol_type = other RNA
aggaaataagagagaaaagaagagtaagaagaaatataagagccaccatgaaacggacagccgacggaagcgagttcgagtcaccaaagaagaagcggaaagtcgacaagaagtacagcatcggcctggacatcggcaccaactctgtgggctgggccgtgatcaccgacgagtacaaggtgcccagcaagaaattcaaggtgctgggcaacaccgaccggcacagcatcaagaagaacctgatcggagccctgctgttcgacagcggcgaaacagccgaggccacccggctgaagagaaccgccagaagaagatacaccagacggaagaaccggatctgctatctgcaagagatcttcagcaacgagatggccaaggtggacgacagcttcttccacagactggaagagtccttcctggtggaagaggataagaagcacgagcggcaccccatcttcggcaacatcgtggacgaggtggcctaccacgagaagtaccccaccatctaccacctgagaaagaaactggtggacagcaccgacaaggccgacctgcggctgatctatctggccctggcccacatgatcaagttccggggccacttcctgatcgagggcgacctgaaccccgacaacagcgacgtggacaagctgttcatccagctggtgcagacctacaaccagctgttcgaggaaaaccccatcaacgccagcggcgtggacgccaaggccatcctgtctgccagactgagcaagagcagacggctggaaaatctgatcgcccagctgcccggcgagaagaagaatggcctgttcggaaacctgattgccctgagcctgggcctgacccccaacttcaagagcaacttcgacctggccgaggatgccaaactgcagctgagcaaggacacctacgacgacgacctggacaacctgctggcccagatcggcgaccagtacgccgacctgtttctggccgccaagaacctgtccgacgccatcctgctgagcgacatcctgagagtgaacaccgagatcaccaaggcccccctgagcgcctctatgatcaagagatacgacgagcaccaccaggacctgaccctgctgaaagctctcgtgcggcagcagctgcctgagaagtacaaagagattttcttcgaccagagcaagaacggctacgccggctacattgacggcggagccagccaggaagagttctacaagttcatcaagcccatcctggaaaagatggacggcaccgaggaactgctcgtgaagctgaacagagaggacctgctgcggaagcagcggaccttcgacaacggcagcatcccccaccagatccacctgggagagctgcacgccattctgcggcggcaggaagatttttacccattcctgaaggacaaccgggaaaagatcgagaagatcctgaccttccgcatcccctactacgtgggccctctggccaggggaaacagcagattcgcctggatgaccagaaagagcgaggaaaccatcaccccctggaacttcgaggaagtggtggacaagggcgcttccgcccagagcttcatcgagcggatgaccaacttcgataagaacctgcccaacgagaaggtgctgcccaagcacagcctgctgtacgagtacttcaccgtgtataacgagctgaccaaagtgaaatacgtgaccgagggaatgagaaagcccgccttcctgagcggcgagcagaaaaaggccatcgtggacctgctgttcaagaccaaccggaaagtgaccgtgaagcagctgaaagaggactacttcaagaaaatcgagtgcttcgactccgtggaaatctccggcgtggaagatcggttcaacgcctccctgggcacataccacgatctgctgaaaattatcaaggacaaggacttcctggacaatgaggaaaacgaggacattctggaagatatcgtgctgaccctgacactgtttgaggacagagagatgatcgaggaacggctgaaaacctatgcccacctgttcgacgacaaagtgatgaagcagctgaagcggcggagatacaccggctggggcaggctgagccggaagctgatcaacggcatccgggacaagcagtccggcaagacaatcctggatttcctgaagtccgacggcttcgccaacagaaacttcatgcagctgatccacgacgacagcctgacctttaaagaggacatccagaaagcccaggtgtccggccagggcgatagcctgcacgagcacattgccaatctggccggcagccccgccattaagaagggcatcctgcagacagtgaaggtggtggacgagctcgtgaaagtgatgggccggcacaagcccgagaacatcgtgatcgaaatggccagagagaaccagaccacccagaagggacagaagaacagccgcgagagaatgaagcggatcgaagagggcatcaaagagctgggcagccagatcctgaaagaacaccccgtggaaaacacccagctgcagaacgagaagctgtacctgtactacctgcagaatgggcgggatatgtacgtggaccaggaactggacatcaaccggctgtccgactacgatgtggacgctatcgtgcctcagagctttctgaaggacgactccatcgacaacaaggtgctgaccagaagcgacaagaaccggggcaagagcgacaacgtgccctccgaagaggtcgtgaagaagatgaagaactactggcggcagctgctgaacgccaagctgattacccagagaaagttcgacaatctgaccaaggccgagagaggcggcctgagcgaactggataaggccggcttcatcaagagacagctggtggaaacccggcagatcacaaagcacgtggcacagatcctggactcccggatgaacactaagtacgacgagaatgacaagctgatccgggaagtgaaagtgatcaccctgaagtccaagctggtgtccgatttccggaaggatttccagttttacaaagtgcgcgagatcaacaactaccaccacgcccacgacgcctacctgaacgccgtcgtgggaaccgccctgatcaaaaagtaccctaagctggaaagcgagttcgtgtacggcgactacaaggtgtacgacgtgcggaagatgatcgccaagagcgagcaggaaatcggcaaggctaccgccaagtacttcttctacagcaacatcatgaactttttcaagaccgagattaccctggccaacggcgagatccggaagcggcctctgatcgagacaaacggcgaaaccggggagatcgtgtgggataagggccgggattttgccaccgtgcggaaagtgctgagcatgccccaagtgaatatcgtgaaaaagaccgaggtgcagacaggcggcttcagcaaagagtctatcctgcccaagaggaacagcgataagctgatcgccagaaagaaggactgggaccctaagaagtacggcggcttcgacagccccaccgtggcctattctgtgctggtggtggccaaagtggaaaagggcaagtccaagaaactgaagagtgtgaaagagctgctggggatcaccatcatggaaagaagcagcttcgagaagaatcccatcgactttctggaagccaagggctacaaagaagtgaaaaaggacctgatcatcaagctgcctaagtactccctgttcgagctggaaaacggccggaagagaatgctggcctctgccggcgaactgcagaagggaaacgaactggccctgccctccaaatatgtgaacttcctgtacctggccagccactatgagaagctgaagggctcccccgaggataatgagcagaaacagctgtttgtggaacagcacaagcactacctggacgagatcatcgagcagatcagcgagttctccaagagagtgatcctggccgacgctaatctggacaaagtgctgtccgcctacaacaagcaccgggataagcccatcagagagcaggccgagaatatcatccacctgtttaccctgaccaatctgggagcccctgccgccttcaagtactttgacaccaccatcgaccggaagaggtacaccagcaccaaagaggtgctggacgccaccctgatccaccagagcatcaccggcctgtacgagacacggatcgacctgtctcagctgggaggtgactccggcggctcctccggcggaagcagcggcggcagcagcggcggaagcagcggcggcagcagcggcggaagctctggcggatctagcggcggctctaccctgaacatcgaggacgagtacaggctgcacgagaccagcaaggagcccgacgtgagcctgggcagcacctggctgagcgatttccctcaggcttgggccgagaccggcggcatgggcctggccgtgcggcaggcccccctgattatccccctgaaggccaccagcacccccgtgagcatcaagcagtacccaatgtcccaggaggccaggctgggcatcaagcctcacatccagaggctgctggaccagggcatcctggtgccatgccagtccccctggaacacccctctgctgcccgtgaagaagcctggcaccaacgactaccggcccgtgcaggacctgagagaagtgaacaagcgggtggaggacatccacccaaccgtgcccaacccttacaacctgctgtccggcctgccccccagccaccagtggtacaccgtgctggacctgaaggacgccttcttctgcctgagactgcaccccacctctcagcccctgttcgccttcgagtggcgcgaccccgagatgggcatcagcggccagctgacctggaccagactgccacagggctttaagaatagcccaaccctgtttaacgaggccctgcacagggacctggccgacttcaggatccagcaccccgacctgattctgctgcagtacgtggacgacctgctgctggccgctaccagcgagctggactgccagcagggcaccagagccctgctgcagaccctgggcaacctgggctacagagccagcgccaagaaggcccagatctgtcagaagcaggtgaagtatctgggctacctgctgaaggaaggccagagatggctgaccgaggccagaaaggagactgtgatgggccagcccacccccaagacccccaggcagctgcgggagttcctgggcaaggccggcttttgcagactgtttatccctggcttcgccgagatggccgccccactgtaccctctgaccaagcctggcaccctgtttaactggggccccgaccagcagaaggcctaccaggagatcaagcaggccctgctgaccgcccccgccctgggcctgcccgacctgaccaagcctttcgagctgttcgtggacgagaagcagggatacgccaaaggcgtgctgacccagaagctgggcccctggcggaggcccgtggcctacctgagcaaaaaactggaccctgtggccgccggctggcccccatgcctgcggatggtggccgccatcgctgtgctgaccaaggacgccggcaagctgaccatgggccagcccctggtgatcctggcccctcacgccgtggaggctctggtgaagcagcctccagacaggtggctgtccaacgccaggatgacccactaccaggccctgctgctggacaccgaccgggtgcagttcggccctgtggtggccctgaaccccgccaccctgctgcctctgccagaggagggcctgcagcacaactgcctggacatcctggccgaggcccacggcaccaggcccgacctgaccgaccagcccctgcctgacgccgaccacacctggtacaccgacggcagctccctgctgcaggagggccagaggaaggccggcgccgccgtgaccaccgagaccgaggtgatctgggccaaagccctgcctgccggcacctccgcccagcgggccgagctgatcgccctgacccaggccctgaagatggctgagggcaagaagctgaacgtgtacaccgattccagatacgccttcgccaccgcccacatccacggcgagatctacagaagaaggggctggctgacctccgagggcaaggagatcaagaacaaggacgagattctggccctgctgaaggccctgttcctgcctaagagactgagcatcatccactgtcccggccaccagaagggccacagcgccgaggccagaggcaatagaatggccgaccaggccgccagaaaggccgccatcaccgagacccccgacaccagcaccctgctgatcgagaacagcagccccagcggcggctccaaacgcaccgccgacgggagcgagttcgagcccaagaagaagaggaaagtctaatagtgagcggccgcttaattaagctgccttctgcggggcttgccttctggccaagcccttcttctctcccttgcacctgtacctcttggtctttgaataaagcctgagtaggaag

SEQ ID NO: 594 - RNA, 5988 nt, synthetic construct
  misc_feature 1..5988: note = Description of Artificial Sequence: Synthetic polynucleotide
  source 1..5988: mol_type = other RNA
aggaaataagagagaaaagaagagtaagaagaaatataagagccaccatgaaacggacagccgacggaagcgagttcgagtcaccaaagaagaagcggaaagtcgacaagaagtacagcatcggcctggacatcggcaccaactctgtgggctgggccgtgatcaccgacgagtacaaggtgcccagcaagaaattcaaggtgctgggcaacaccgaccggcacagcatcaagaagaacctgatcggagccctgctgttcgacagcggcgaaacagccgaggccacccggctgaagagaaccgccagaagaagatacaccagacggaagaaccggatctgctatctgcaagagatcttcagcaacgagatggccaaggtggacgacagcttcttccacagactggaagagtccttcctggtggaagaggataagaagcacgagcggcaccccatcttcggcaacatcgtggacgaggtggcctaccacgagaagtaccccaccatctaccacctgagaaagaaactggtggacagcaccgacaaggccgacctgcggctgatctatctggccctggcccacatgatcaagttccggggccacttcctgatcgagggcgacctgaaccccgacaacagcgacgtggacaagctgttcatccagctggtgcagacctacaaccagctgttcgaggaaaaccccatcaacgccagcggcgtggacgccaaggccatcctgtctgccagactgagcaagagcagacggctggaaaatctgatcgcccagctgcccggcgagaagaagaatggcctgttcggaaacctgattgccctgagcctgggcctgacccccaacttcaagagcaacttcgacctggccgaggatgccaaactgcagctgagcaaggacacctacgacgacgacctggacaacctgctggcccagatcggcgaccagtacgccgacctgtttctggccgccaagaacctgtccgacgccatcctgctgagcgacatcctgagagtgaacaccgagatcaccaaggcccccctgagcgcctctatgatcaagagatacgacgagcaccaccaggacctgaccctgctgaaagctctcgtgcggcagcagctgcctgagaagtacaaagagattttcttcgaccagagcaagaacggctacgccggctacattgacggcggagccagccaggaagagttctacaagttcatcaagcccatcctggaaaagatggacggcaccgaggaactgctcgtgaagctgaacagagaggacctgctgcggaagcagcggaccttcgacaacggcagcatcccccaccagatccacctgggagagctgcacgccattctgcggcggcaggaagatttttacccattcctgaaggacaaccgggaaaagatcgagaagatcctgaccttccgcatcccctactacgtgggccctctggccaggggaaacagcagattcgcctggatgaccagaaagagcgaggaaaccatcaccccctggaacttcgaggaagtggtggacaagggcgcttccgcccagagcttcatcgagcggatgaccaacttcgataagaacctgcccaacgagaaggtgctgcccaagcacagcctgctgtacgagtacttcaccgtgtataacgagctgaccaaagtgaaatacgtgaccgagggaatgagaaagcccgccttcctgagcggcgagcagaaaaaggccatcgtggacctgctgttcaagaccaaccggaaagtgaccgtgaagcagctgaaagaggactacttcaagaaaatcgagtgcttcgactccgtggaaatctccggcgtggaagatcggttcaacgcctccctgggcacataccacgatctgctgaaaattatcaaggacaaggacttcctggacaatgaggaaaacgaggacattctggaagatatcgtgctgaccctgacactgtttgaggacagagagatgatcgaggaacggctgaaaacctatgcccacctgttcgacgacaaagtgatgaagcagctgaagcggcggagatacaccggctggggcaggctgagccggaagctgatcaacggcatccgggacaagcagtccggcaagacaatcctggatttcctgaagtccgacggcttcgccaacagaaacttcatgcagctgatccacgacgacagcctgacctttaaagaggacatccagaaagcccaggtgtccggccagggcgatagcctgcacgagcacattgccaatctggccggcagccccgccattaagaagggcatcctgcagacagtgaaggtggtggacgagctcgtgaaagtgatgggccggcacaagcccgagaacatcgtgatcgaaatggccagagagaaccagaccacccagaagggacagaagaacagccgcgagagaatgaagcggatcgaagagggcatcaaagagctgggcagccagatcctgaaagaacaccccgtggaaaacacccagctgcagaacgagaagctgtacctgtactacctgcagaatgggcgggatatgtacgtggaccaggaactggacatcaaccggctgtccgactacgatgtggacgctatcgtgcctcagagctttctgaaggacgactccatcgacaacaaggtgctgaccagaagcgacaagaaccggggcaagagcgacaacgtgccctccgaagaggtcgtgaagaagatgaagaactactggcggcagctgctgaacgccaagctgattacccagagaaagttcgacaatctgaccaaggccgagagaggcggcctgagcgaactggataaggccggcttcatcaagagacagctggtggaaacccggcagatcacaaagcacgtggcacagatcctggactcccggatgaacactaagtacgacgagaatgacaagctgatccgggaagtgaaagtgatcaccctgaagtccaagctggtgtccgatttccggaaggatttccagttttacaaagtgcgcgagatcaacaactaccaccacgcccacgacgcctacctgaacgccgtcgtgggaaccgccctgatcaaaaagtaccctaagctggaaagcgagttcgtgtacggcgactacaaggtgtacgacgtgcggaagatgatcgccaagagcgagcaggaaatcggcaaggctaccgccaagtacttcttctacagcaacatcatgaactttttcaagaccgagattaccctggccaacggcgagatccggaagcggcctctgatcgagacaaacggcgaaaccggggagatcgtgtgggataagggccgggattttgccaccgtgcggaaagtgctgagcatgccccaagtgaatatcgtgaaaaagaccgaggtgcagacaggcggcttcagcaaagagtctatcctgcccaagaggaacagcgataagctgatcgccagaaagaaggactgggaccctaagaagtacggcggcttcgacagccccaccgtggcctattctgtgctggtggtggccaaagtggaaaagggcaagtccaagaaactgaagagtgtgaaagagctgctggggatcaccatcatggaaagaagcagcttcgagaagaatcccatcgactttctggaagccaagggctacaaagaagtgaaaaaggacctgatcatcaagctgcctaagtactccctgttcgagctggaaaacggccggaagagaatgctggcctctgccggcgaactgcagaagggaaacgaactggccctgccctccaaatatgtgaacttcctgtacctggccagccactatgagaagctgaagggctcccccgaggataatgagcagaaacagctgtttgtggaacagcacaagcactacctggacgagatcatcgagcagatcagcgagttctccaagagagtgatcctggccgacgctaatctggacaaagtgctgtccgcctacaacaagcaccgggataagcccatcagagagcaggccgagaatatcatccacctgtttaccctgaccaatctgggagcccctgccgccttcaagtactttgacaccaccatcgaccggaagaggtacactagcaccaaagaggtgctggacgccaccctgatccaccagagcatcaccggcctgtacgagacacggatcgacctgtctcagctgggaggtgactccggcggctcctccggcggaagcagcggcggcagcagcggcggaagcagcggcggcagcagcggcggaagctctggcggatctagcggcggctctaccctgaacatcgaggacgagtacaggctgcacgagaccagcaaggagcccgacgtgagcctgggcagcacctggctgagcgatttccctcaggcttgggccgagaccggcggcatgggcctggccgtgcggcaggcccccctgattatccccctgaaggccaccagcacccccgtgagcatcaagcagtacccaatgtcccaggaggccaggctgggcatcaagcctcacatccagaggctgctggaccagggcatcctggtgccatgccagtccccctggaacacccctctgctgcccgtgaagaagcctggcaccaacgactaccggcccgtgcaggacctgagagaagtgaacaagcgggtggaggacatccacccaaccgtgcccaacccttacaacctgctgtccggcctgccccccagccaccagtggtacaccgtgctggacctgaaggacgccttcttctgcctgagactgcaccccacctctcagcccctgttcgccttcgagtggcgcgaccccgagatgggcatcagcggccagctgacctggaccagactgccacagggctttaagaatagcccaaccctgtttaacgaggccctgcacagggacctggccgacttcaggatccagcaccccgacctgattctgctgcagtacgtggacgacctgctgctggccgctaccagcgagctggactgccagcagggcaccagagccctgctgcagaccctgggcaacctgggctacagagccagcgccaagaaggcccagatctgtcagaagcaggtgaagtatctgggctacctgctgaaggaaggccagagatggctgaccgaggccagaaaggagactgtgatgggccagcccacccccaagacccccaggcagctgcgggagttcctgggcaaggccggcttttgcagactgtttatccctggcttcgccgagatggccgccccactgtaccctctgaccaagcctggcaccctgtttaactggggccccgaccagcagaaggcctaccaggagatcaagcaggccctgctgaccgcccccgccctgggcctgcccgacctgaccaagcctttcgagctgttcgtggacgagaagcagggatacgccaaaggcgtgctgacccagaagctgggcccctggcggaggcccgtggcctacctgagcaaaaaactggaccctgtggccgccggctggcccccatgcctgcggatggtggccgccatcgctgtgctgaccaaggacgccggcaagctgaccatgggccagcccctggtgatcctggcccctcacgccgtggaggctctggtgaagcagcctccagacaggtggctgtccaacgccaggatgacccactaccaggccctgctgctggacaccgaccgggtgcagttcggccctgtggtggccctgaaccccgccaccctgctgcctctgccagaggagggcctgcagcacaactgcctggacatcctggccgaggcccacggcagcggcggctccaaacgcaccgccgacgggagcgagttcgagcccaagaagaagaggaaagtctaagcggccgcttaattaagctgccttctgcggggcttgccttctggccaagcccttcttctctcccttgcacctgtacctcttggtctttgaataaagcctgagtaggaag

SEQ ID NO: 595 - RNA, 5994 nt, synthetic construct
  misc_feature 1..5994: note = Description of Artificial Sequence: Synthetic polynucleotide
  source 1..5994: mol_type = other RNA
aggaaataagagagaaaagaagagtaagaagaaatataagagccaccatgaaacggacagccgacggaagcgagttcgagtcaccaaagaagaagcggaaagtcgacaagaagtacagcatcggcctggacatcggcaccaactctgtgggctgggccgtgatcaccgacgagtacaaggtgcccagcaagaaattcaaggtgctgggcaacaccgaccggcacagcatcaagaagaacctgatcggagccctgctgttcgacagcggcgaaacagccgaggccacccggctgaagagaaccgccagaagaagatacaccagacggaagaaccggatctgctatctgcaagagatcttcagcaacgagatggccaaggtggacgacagcttcttccacagactggaagagtccttcctggtggaagaggataagaagcacgagcggcaccccatcttcggcaacatcgtggacgaggtggcctaccacgagaagtaccccaccatctaccacctgagaaagaaactggtggacagcaccgacaaggccgacctgcggctgatctatctggccctggcccacatgatcaagttccggggccacttcctgatcgagggcgacctgaaccccgacaacagcgacgtggacaagctgttcatccagctggtgcagacctacaaccagctgttcgaggaaaaccccatcaacgccagcggcgtggacgccaaggccatcctgtctgccagactgagcaagagcagacggctggaaaatctgatcgcccagctgcccggcgagaagaagaatggcctgttcggaaacctgattgccctgagcctgggcctgacccccaacttcaagagcaacttcgacctggccgaggatgccaaactgcagctgagcaaggacacctacgacgacgacctggacaacctgctggcccagatcggcgaccagtacgccgacctgtttctggccgccaagaacctgtccgacgccatcctgctgagcgacatcctgagagtgaacaccgagatcaccaaggcccccctgagcgcctctatgatcaagagatacgacgagcaccaccaggacctgaccctgctgaaagctctcgtgcggcagcagctgcctgagaagtacaaagagattttcttcgaccagagcaagaacggctacgccggctacattgacggcggagccagccaggaagagttctacaagttcatcaagcccatcctggaaaagatggacggcaccgaggaactgctcgtgaagctgaacagagaggacctgctgcggaagcagcggaccttcgacaacggcagcatcccccaccagatccacctgggagagctgcacgccattctgcggcggcaggaagatttttacccattcctgaaggacaaccgggaaaagatcgagaagatcctgaccttccgcatcccctactacgtgggccctctggccaggggaaacagcagattcgcctggatgaccagaaagagcgaggaaaccatcaccccctggaacttcgaggaagtggtggacaagggcgcttccgcccagagcttcatcgagcggatgaccaacttcgataagaacctgcccaacgagaaggtgctgcccaagcacagcctgctgtacgagtacttcaccgtgtataacgagctgaccaaagtgaaatacgtgaccgagggaatgagaaagcccgccttcctgagcggcgagcagaaaaaggccatcgtggacctgctgttcaagaccaaccggaaagtgaccgtgaagcagctgaaagaggactacttcaagaaaatcgagtgcttcgactccgtggaaatctccggcgtggaagatcggttcaacgcctccctgggcacataccacgatctgctgaaaattatcaaggacaaggacttcctggacaatgaggaaaacgaggacattctggaagatatcgtgctgaccctgacactgtttgaggacagagagatgatcgaggaacggctgaaaacctatgcccacctgttcgacgacaaagtgatgaagcagctgaagcggcggagatacaccggctggggcaggctgagccggaagctgatcaacggcatccgggacaagcagtccggcaagacaatcctggatttcctgaagtccgacggcttcgccaacagaaacttcatgcagctgatccacgacgacagcctgacctttaaagaggacatccagaaagcccaggtgtccggccagggcgatagcctgcacgagcacattgccaatctggccggcagccccgccattaagaagggcatcctgcagacagtgaaggtggtggacgagctcgtgaaagtgatgggccggcacaagcccgagaacatcgtgatcgaaatggccagagagaaccagaccacccagaagggacagaagaacagccgcgagagaatgaagcggatcgaagagggcatcaaagagctgggcagccagatcctgaaagaacaccccgtggaaaacacccagctgcagaacgagaagctgtacctgtactacctgcagaatgggcgggatatgtacgtggaccaggaactggacatcaaccggctgtccgactacgatgtggacgctatcgtgcctcagagctttctgaaggacgactccatcgacaacaaggtgctgaccagaagcgacaagaaccggggcaagagcgacaacgtgccctccgaagaggtcgtgaagaagatgaagaactactggcggcagctgctgaacgccaagctgattacccagagaaagttcgacaatctgaccaaggccgagagaggcggcctgagcgaactggataaggccggcttcatcaagagacagctggtggaaacccggcagatcacaaagcacgtggcacagatcctggactcccggatgaacactaagtacgacgagaatgacaagctgatccgggaagtgaaagtgatcaccctgaagtccaagctggtgtccgatttccggaaggatttccagttttacaaagtgcgcgagatcaacaactaccaccacgcccacgacgcctacctgaacgccgtcgtgggaaccgccctgatcaaaaagtaccctaagctggaaagcgagttcgtgtacggcgactacaaggtgtacgacgtgcggaagatgatcgccaagagcgagcaggaaatcggcaaggctaccgccaagtacttcttctacagcaacatcatgaactttttcaagaccgagattaccctggccaacggcgagatccggaagcggcctctgatcgagacaaacggcgaaaccggggagatcgtgtgggataagggccgggattttgccaccgtgcggaaagtgctgagcatgccccaagtgaatatcgtgaaaaagaccgaggtgcagacaggcggcttcagcaaagagtctatcctgcccaagaggaacagcgataagctgatcgccagaaagaaggactgggaccctaagaagtacggcggcttcgacagccccaccgtggcctattctgtgctggtggtggccaaagtggaaaagggcaagtccaagaaactgaagagtgtgaaagagctgctggggatcaccatcatggaaagaagcagcttcgagaagaatcccatcgactttctggaagccaagggctacaaagaagtgaaaaaggacctgatcatcaagctgcctaagtactccctgttcgagctggaaaacggccggaagagaatgctggcctctgccggcgaactgcagaagggaaacgaactggccctgccctccaaatatgtgaacttcctgtacctggccagccactatgagaagctgaagggctcccccgaggataatgagcagaaacagctgtttgtggaacagcacaagcactacctggacgagatcatcgagcagatcagcgagttctccaagagagtgatcctggccgacgctaatctggacaaagtgctgtccgcctacaacaagcaccgggataagcccatcagagagcaggccgagaatatcatccacctgtttaccctgaccaatctgggagcccctgccgccttcaagtactttgacaccaccatcgaccggaagaggtacactagcaccaaagaggtgctggacgccaccctgatccaccagagcatcaccggcctgtacgagacacggatcgacctgtctcagctgggaggtgactccggcggctcctccggcggaagcagcggcggcagcagcggcggaagcagcggcggcagcagcggcggaagctctggcggatctagcggcggctctaccctgaacatcgaggacgagtacaggctgcacgagaccagcaaggagcccgacgtgagcctgggcagcacctggctgagcgatttccctcaggcttgggccgagaccggcggcatgggcctggccgtgcggcaggcccccctgattatccccctgaaggccaccagcacccccgtgagcatcaagcagtacccaatgtcccaggaggccaggctgggcatcaagcctcacatccagaggctgctggaccagggcatcctggtgccatgccagtccccctggaacacccctctgctgcccgtgaagaagcctggcaccaacgactaccggcccgtgcaggacctgagagaagtgaacaagcgggtggaggacatccacccaaccgtgcccaacccttacaacctgctgtccggcctgccccccagccaccagtggtacaccgtgctggacctgaaggacgccttcttctgcctgagactgcaccccacctctcagcccctgttcgccttcgagtggcgcgaccccgagatgggcatcagcggccagctgacctggaccagactgccacagggctttaagaatagcccaaccctgtttaacgaggccctgcacagggacctggccgacttcaggatccagcaccccgacctgattctgctgcagtacgtggacgacctgctgctggccgctaccagcgagctggactgccagcagggcaccagagccctgctgcagaccctgggcaacctgggctacagagccagcgccaagaaggcccagatctgtcagaagcaggtgaagtatctgggctacctgctgaaggaaggccagagatggctgaccgaggccagaaaggagactgtgatgggccagcccacccccaagacccccaggcagctgcgggagttcctgggcaaggccggcttttgcagactgtttatccctggcttcgccgagatggccgccccactgtaccctctgaccaagcctggcaccctgtttaactggggccccgaccagcagaaggcctaccaggagatcaagcaggccctgctgaccgcccccgccctgggcctgcccgacctgaccaagcctttcgagctgttcgtggacgagaagcagggatacgccaaaggcgtgctgacccagaagctgggcccctggcggaggcccgtggcctacctgagcaaaaaactggaccctgtggccgccggctggcccccatgcctgcggatggtggccgccatcgctgtgctgaccaaggacgccggcaagctgaccatgggccagcccctggtgatcctggcccctcacgccgtggaggctctggtgaagcagcctccagacaggtggctgtccaacgccaggatgacccactaccaggccctgctgctggacaccgaccgggtgcagttcggccctgtggtggccctgaaccccgccaccctgctgcctctgccagaggagggcctgcagcacaactgcctggacatcctggccgaggcccacggcagcggcggctccaaacgcaccgccgacgggagcgagttcgagcccaagaagaagaggaaagtctaatagtgagcggccgcttaattaagctgccttctgcggggcttgccttctggccaagcccttcttctctcccttgcacctgtacctcttggtctttgaataaagcctgagtaggaag

SEQ ID NO: 596 - protein, 1053 aa, synthetic construct
  REGION 1..1053: note = Description of Artificial Sequence: Synthetic polypeptide
MKRNYILGLDIGITSVGYGIIDYETRDVIDAGVRLFKEANVENNEGRRSKRGARRLKRRRRHRIQRVKKLLFDYNLLTDHSELSGINPYEARVKGLSQKLSEEEFSAALLHLAKRRGVHNVNEVEEDTGNELSTKEQISRNSKALEEKYVAELQLERLKKDGEVRGSINRFKTSDYVKEAKQLLKVQKAYHQLDQSFIDTYIDLLETRRTYYEGPGEGSPFGWKDIKEWYEMLMGHCTYFPEELRSVKYAYNADLYNALNDLNNLVITRDENEKLEYYEKFQIIENVFKQKKKPTLKQIAKEILVNEEDIKGYRVTSTGKPEFTNLKVYHDIKDITARKEIIENAELLDQIAKILTIYQSSEDIQEELTNLNSELTQEEIEQISNLKGYTGTHNLSLKAINLILDELWHTNDNQIAIFNRLKLVPKKVDLSQQKEIPTTLVDDFILSPVVKRSFIQSIKVINAIIKKYGLPNDIIIELAREKNSKDAQKMINEMQKRNRQTNERIEEIIRTTGKENAKYLIEKIKLHDMQEGKCLYSLEAIPLEDLLNNPFNYEVDHIIPRSVSFDNSFNNKVLVKQEENSKKGNRTPFQYLSSSDSKISYETFKKHILNLAKGKGRISKTKKEYLLEERDINRFSVQKDFINRNLVDTRYATRGLMNLLRSYFRVNNLDVKVKSINGGFTSFLRRKWKFKKERNKGYKHHAEDALIIANADFIFKEWKKLDKAKKVMENQMFEEKQAESMPEIETEQEYKEIFITPHQIKHIKDFKDYKYSHRVDKKPNRELINDTLYSTRKDDKGNTLIVNNLNGLYDKDNDKLKKLINKSPEKLLMYHHDPQTYQKLKLIMEQYGDEKNPLYKYYEETGNYLTKYSKKDNGPVIKKIKYYGNKLNAHLDITDDYPNSRNKVVKLSLKPYRFDVYLDNGVYKFVTVKNLDVIKKENYYEVNSKCYEEAKKLKKISNQAEFIASFYNNDLIKINGELYRVIGVNNDLLNRIEVNMIDITYREYLENMNDKRPPRIIKTIASKTQSIKKYSTDILGNLYEVKSKKHPQIIKKG

SEQ ID NO: 597 - protein, 1053 aa, synthetic construct
  REGION 1..1053: note = Description of Artificial Sequence: Synthetic polypeptide
MKRNYILGLDIGITSVGYGIIDYETRDVIDAGVRLFKEANVENNEGRRSKRGARRLKRRRRHRIQRVKKLLFDYNLLTDHSELSGINPYEARVKGLSQKLSEEEFSAALLHLAKRRGVHNVNEVEEDTGNELSTKEQISRNSKALEEKYVAELQLERLKKDGEVRGSINRFKTSDYVKEAKQLLKVQKAYHQLDQSFIDTYIDLLETRRTYYEGPGEGSPFGWKDIKEWYEMLMGHCTYFPEELRSVKYAYNADLYNALNDLNNLVITRDENEKLEYYEKFQIIENVFKQKKKPTLKQIAKEILVNEEDIKGYRVTSTGKPEFTNLKVYHDIKDITARKEIIENAELLDQIAKILTIYQSSEDIQEELTNLNSELTQEEIEQISNLKGYTGTHNLSLKAINLILDELWHTNDNQIAIFNRLKLVPKKVDLSQQKEIPTTLVDDFILSPVVKRSFIQSIKVINAIIKKYGLPNDIIIELAREKNSKDAQKMINEMQKRNRQTNERIEEIIRTTGKENAKYLIEKIKLHDMQEGKCLYSLEAIPLEDLLNNPFNYEVDHIIPRSVSFDNSFNNKVLVKQEEASKKGNRTPFQYLSSSDSKISYETFKKHILNLAKGKGRISKTKKEYLLEERDINRFSVQKDFINRNLVDTRYATRGLMNLLRSYFRVNNLDVKVKSINGGFTSFLRRKWKFKKERNKGYKHHAEDALIIANADFIFKEWKKLDKAKKVMENQMFEEKQAESMPEIETEQEYKEIFITPHQIKHIKDFKDYKYSHRVDKKPNRELINDTLYSTRKDDKGNTLIVNNLNGLYDKDNDKLKKLINKSPEKLLMYHHDPQTYQKLKLIMEQYGDEKNPLYKYYEETGNYLTKYSKKDNGPVIKKIKYYGNKLNAHLDITDDYPNSRNKVVKLSLKPYRFDVYLDNGVYKFVTVKNLDVIKKENYYEVNSKCYEEAKKLKKISNQAEFIASFYNNDLIKINGELYRVIGVNNDLLNRIEVNMIDITYREYLENMNDKRPPRIIKTIASKTQSIKKYSTDILGNLYEVKSKKHPQIIKKG

SEQ ID NO: 598 - protein, 1052 aa, synthetic construct
  REGION 1..1052: note = Description of Artificial Sequence: Synthetic polypeptide
KRNYILGLDIGITSVGYGIIDYETRDVIDAGVRLFKEANVENNEGRRSKRGARRLKRRRRHRIQRVKKLLFDYNLLTDHSELSGINPYEARVKGLSQKLSEEEFSAALLHLAKRRGVHNVNEVEEDTGNELSTKEQISRNSKALEEKYVAELQLERLKKDGEVRGSINRFKTSDYVKEAKQLLKVQKAYHQLDQSFIDTYIDLLETRRTYYEGPGEGSPFGWKDIKEWYEMLMGHCTYFPEELRSVKYAYNADLYNALNDLNNLVITRDENEKLEYYEKFQIIENVFKQKKKPTLKQIAKEILVNEEDIKGYRVTSTGKPEFTNLKVYHDIKDITARKEIIENAELLDQIAKILTIYQSSEDIQEELTNLNSELTQEEIEQISNLKGYTGTHNLSLKAINLILDELWHTNDNQIAIFNRLKLVPKKVDLSQQKEIPTTLVDDFILSPVVKRSFIQSIKVINAIIKKYGLPNDIIIELAREKNSKDAQKMINEMQKRNRQTNERIEEIIRTTGKENAKYLIEKIKLHDMQEGKCLYSLEAIPLEDLLNNPFNYEVDHIIPRSVSFDNSFNNKVLVKQEEASKKGNRTPFQYLSSSDSKISYETFKKHILNLAKGKGRISKTKKEYLLEERDINRFSVQKDFINRNLVDTRYATRGLMNLLRSYFRVNNLDVKVKSINGGFTSFLRRKWKFKKERNKGYKHHAEDALIIANADFIFKEWKKLDKAKKVMENQMFEEKQAESMPEIETEQEYKEIFITPHQIKHIKDFKDYKYSHRVDKKPNRELINDTLYSTRKDDKGNTLIVNNLNGLYDKDNDKLKKLINKSPEKLLMYHHDPQTYQKLKLIMEQYGDEKNPLYKYYEETGNYLTKYSKKDNGPVIKKIKYYGNKLNAHLDITDDYPNSRNKVVKLSLKPYRFDVYLDNGVYKFVTVKNLDVIKKENYYEVNSKCYEEAKKLKKISNQAEFIASFYNNDLIKINGELYRVIGVNNDLLNRIEVNMIDITYREYLENMNDKRPPRIIKTIASKTQSIKKYSTDILGNLYEVKSKKHPQIIKKG

SEQ ID NO: 599 - protein, 1368 aa, synthetic construct
  REGION 1..1368: note = Description of Artificial Sequence: Synthetic polypeptide
MDKKYSIGLDIGTNSVGWAVITDEYKVPSKKFKVLGNTDRHSIKKNLIGALLFDSGETAEATRLKRTARRRYTRRKNRICYLQEIFSNEMAKVDDSFFHRLEESFLVEEDKKHERHPIFGNIVDEVAYHEKYPTIYHLRKKLVDSTDKADLRLIYLALAHMIKFRGHFLIEGDLNPDNSDVDKLFIQLVQTYNQLFEENPINASGVDAKAILSARLSKSRRLENLIAQLPGEKKNGLFGNLIALSLGLTPNFKSNFDLAEDAKLQLSKDTYDDDLDNLLAQIGDQYADLFLAAKNLSDAILLSDILRVNTEITKAPLSASMIKRYDEHHQDLTLLKALVRQQLPEKYKEIFFDQSKNGYAGYIDGGASQEEFYKFIKPILEKMDGTEELLVKLNREDLLRKQRTFDNGSIPHQIHLGELHAILRRQEDFYPFLKDNREKIEKILTFRIPYYVGPLARGNSRFAWMTRKSEETITPWNFEEVVDKGASAQSFIERMTNFDKNLPNEKVLPKHSLLYEYFTVYNELTKVKYVTEGMRKPAFLSGEQKKAIVDLLFKTNRKVTVKQLKEDYFKKIECFDSVEISGVEDRFNASLGTYHDLLKIIKDKDFLDNEENEDILEDIVLTLTLFEDREMIEERLKTYAHLFDDKVMKQLKRRRYTGWGRLSRKLINGIRDKQSGKTILDFLKSDGFANRNFMQLIHDDSLTFKEDIQKAQVSGQGDSLHEHIANLAGSPAIKKGILQTVKVVDELVKVMGRHKPENIVIEMARENQTTQKGQKNSRERMKRIEEGIKELGSQILKEHPVENTQLQNEKLYLYYLQNGRDMYVDQELDINRLSDYDVDHIVPQSFLKDDSIDNKVLTRSDKNRGKSDNVPSEEVVKKMKNYWRQLLNAKLITQRKFDNLTKAERGGLSELDKAGFIKRQLVETRQITKHVAQILDSRMNTKYDENDKLIREVKVITLKSKLVSDFRKDFQFYKVREINNYHHAHDAYLNAVVGTALIKKYPKLESEFVYGDYKVYDVRKMIAKSEQEIGKATAKYFFYSNIMNFFKTEITLANGEIRKRPLIETNGETGEIVWDKGRDFATVRKVLSMPQVNIVKKTEVQTGGFSKESIRPKRNSDKLIARKKDWDPKKYGGFVSPTVAYSVLVVAKVEKGKSKKLKSVKELLGITIMERSSFEKNPIDFLEAKGYKEVKKDLIIKLPKYSLFELENGRKRMLASARFLQKGNELALPSKYVNFLYLASHYEKLKGSPEDNEQKQLFVEQHKHYLDEIIEQISEFSKRVILADANLDKVLSAYNKHRDKPIREQAENIIHLFTLTNLGAPRAFKYFDTTIDRKVYRSTKEVLDATLIHQSITGLYETRIDLSQLGGD

SEQ ID NO: 600 - protein, 1368 aa, synthetic construct
  REGION 1..1368: note = Description of Artificial Sequence: Synthetic polypeptide
MDKKYSIGLDIGTNSVGWAVITDEYKVPSKKFKVLGNTDRHSIKKNLIGALLFDSGETAEATRLKRTARRRYTRRKNRICYLQEIFSNEMAKVDDSFFHRLEESFLVEEDKKHERHPIFGNIVDEVAYHEKYPTIYHLRKKLVDSTDKADLRLIYLALAHMIKFRGHFLIEGDLNPDNSDVDKLFIQLVQTYNQLFEENPINASGVDAKAILSARLSKSRRLENLIAQLPGEKKNGLFGNLIALSLGLTPNFKSNFDLAEDAKLQLSKDTYDDDLDNLLAQIGDQYADLFLAAKNLSDAILLSDILRVNTEITKAPLSASMIKRYDEHHQDLTLLKALVRQQLPEKYKEIFFDQSKNGYAGYIDGGASQEEFYKFIKPILEKMDGTEELLVKLNREDLLRKQRTFDNGSIPHQIHLGELHAILRRQEDFYPFLKDNREKIEKILTFRIPYYVGPLARGNSRFAWMTRKSEETITPWNFEEVVDKGASAQSFIERMTNFDKNLPNEKVLPKHSLLYEYFTVYNELTKVKYVTEGMRKPAFLSGEQKKAIVDLLFKTNRKVTVKQLKEDYFKKIECFDSVEISGVEDRFNASLGTYHDLLKIIKDKDFLDNEENEDILEDIVLTLTLFEDREMIEERLKTYAHLFDDKVMKQLKRRRYTGWGRLSRKLINGIRDKQSGKTILDFLKSDGFANRNFMQLIHDDSLTFKEDIQKAQVSGQGDSLHEHIANLAGSPAIKKGILQTVKVVDELVKVMGRHKPENIVIEMARENQTTQKGQKNSRERMKRIEEGIKELGSQILKEHPVENTQLQNEKLYLYYLQNGRDMYVDQELDINRLSDYDVDAIVPQSFLKDDSIDNKVLTRSDKNRGKSDNVPSEEVVKKMKNYWRQLLNAKLITQRKFDNLTKAERGGLSELDKAGFIKRQLVETRQITKHVAQILDSRMNTKYDENDKLIREVKVITLKSKLVSDFRKDFQFYKVREINNYHHAHDAYLNAVVGTALIKKYPKLESEFVYGDYKVYDVRKMIAKSEQEIGKATAKYFFYSNIMNFFKTEITLANGEIRKRPLIETNGETGEIVWDKGRDFATVRKVLSMPQVNIVKKTEVQTGGFSKESIRPKRNSDKLIARKKDWDPKKYGGFVSPTVAYSVLVVAKVEKGKSKKLKSVKELLGITIMERSSFEKNPIDFLEAKGYKEVKKDLIIKLPKYSLFELENGRKRMLASARFLQKGNELALPSKYVNFLYLASHYEKLKGSPEDNEQKQLFVEQHKHYLDEIIEQISEFSKRVILADANLDKVLSAYNKHRDKPIREQAENIIHLFTLTNLGAPRAFKYFDTTIDRKVYRSTKEVLDATLIHQSITGLYETRIDLSQLGGD

SEQ ID NO: 601 - protein, 1367 aa, synthetic construct
  REGION 1..1367: note = Description of Artificial Sequence: Synthetic polypeptide
DKKYSIGLDIGTNSVGWAVITDEYKVPSKKFKVLGNTDRHSIKKNLIGALLFDSGETAEATRLKRTARRRYTRRKNRICYLQEIFSNEMAKVDDSFFHRLEESFLVEEDKKHERHPIFGNIVDEVAYHEKYPTIYHLRKKLVDSTDKADLRLIYLALAHMIKFRGHFLIEGDLNPDNSDVDKLFIQLVQTYNQLFEENPINASGVDAKAILSARLSKSRRLENLIAQLPGEKKNGLFGNLIALSLGLTPNFKSNFDLAEDAKLQLSKDTYDDDLDNLLAQIGDQYADLFLAAKNLSDAILLSDILRVNTEITKAPLSASMIKRYDEHHQDLTLLKALVRQQLPEKYKEIFFDQSKNGYAGYIDGGASQEEFYKFIKPILEKMDGTEELLVKLNREDLLRKQRTFDNGSIPHQIHLGELHAILRRQEDFYPFLKDNREKIEKILTFRIPYYVGPLARGNSRFAWMTRKSEETITPWNFEEVVDKGASAQSFIERMTNFDKNLPNEKVLPKHSLLYEYFTVYNELTKVKYVTEGMRKPAFLSGEQKKAIVDLLFKTNRKVTVKQLKEDYFKKIECFDSVEISGVEDRFNASLGTYHDLLKIIKDKDFLDNEENEDILEDIVLTLTLFEDREMIEERLKTYAHLFDDKVMKQLKRRRYTGWGRLSRKLINGIRDKQSGKTILDFLKSDGFANRNFMQLIHDDSLTFKEDIQKAQVSGQGDSLHEHIANLAGSPAIKKGILQTVKVVDELVKVMGRHKPENIVIEMARENQTTQKGQKNSRERMKRIEEGIKELGSQILKEHPVENTQLQNEKLYLYYLQNGRDMYVDQELDINRLSDYDVDAIVPQSFLKDDSIDNKVLTRSDKNRGKSDNVPSEEVVKKMKNYWRQLLNAKLITQRKFDNLTKAERGGLSELDKAGFIKRQLVETRQITKHVAQILDSRMNTKYDENDKLIREVKVITLKSKLVSDFRKDFQFYKVREINNYHHAHDAYLNAVVGTALIKKYPKLESEFVYGDYKVYDVRKMIAKSEQEIGKATAKYFFYSNIMNFFKTEITLANGEIRKRPLIETNGETGEIVWDKGRDFATVRKVLSMPQVNIVKKTEVQTGGFSKESIRPKRNSDKLIARKKDWDPKKYGGFVSPTVAYSVLVVAKVEKGKSKKLKSVKELLGITIMERSSFEKNPIDFLEAKGYKEVKKDLIIKLPKYSLFELENGRKRMLASARFLQKGNELALPSKYVNFLYLASHYEKLKGSPEDNEQKQLFVEQHKHYLDEIIEQISEFSKRVILADANLDKVLSAYNKHRDKPIREQAENIIHLFTLTNLGAPRAFKYFDTTIDRKVYRSTKEVLDATLIHQSITGLYETRIDLSQLGGD

SEQ ID NO: 602 - protein, 1368 aa, synthetic construct
  REGION 1..1368: note = Description of Artificial Sequence: Synthetic polypeptide
MDKKYSIGLDIGTNSVGWAVITDEYKVPSKKFKVLGNTDRHSIKKNLIGALLFDSGETAEATRLKRTARRRYTRRKNRICYLQEIFSNEMAKVDDSFFHRLEESFLVEEDKKHERHPIFGNIVDEVAYHEKYPTIYHLRKKLVDSTDKADLRLIYLALAHMIKFRGHFLIEGDLNPDNSDVDKLFIQLVQTYNQLFEENPINASGVDAKAILSARLSKSRRLENLIAQLPGEKKNGLFGNLIALSLGLTPNFKSNFDLAEDAKLQLSKDTYDDDLDNLLAQIGDQYADLFLAAKNLSDAILLSDILRVNTEITKAPLSASMIKRYDEHHQDLTLLKALVRQQLPEKYKEIFFDQSKNGYAGYIDGGASQEEFYKFIKPILEKMDGTEELLVKLNREDLLRKQRTFDNGSIPHQIHLGELHAILRRQEDFYPFLKDNREKIEKILTFRIPYYVGPLARGNSRFAWMTRKSEETITPWNFEEVVDKGASAQSFIERMTNFDKNLPNEKVLPKHSLLYEYFTVYNELTKVKYVTEGMRKPAFLSGEQKKAIVDLLFKTNRKVTVKQLKEDYFKKIECFDSVEISGVEDRFNASLGTYHDLLKIIKDKDFLDNEENEDILEDIVLTLTLFEDREMIEERLKTYAHLFDDKVMKQLKRRRYTGWGRLSRKLINGIRDKQSGKTILDFLKSDGFANRNFMQLIHDDSLTFKEDIQKAQVSGQGDSLHEHIANLAGSPAIKKGILQTVKVVDELVKVMGRHKPENIVIEMARENQTTQKGQKNSRERMKRIEEGIKELGSQILKEHPVENTQLQNEKLYLYYLQNGRDMYVDQELDINRLSDYDVDHIVPQSFLKDDSIDNKVLTRSDKNRGKSDNVPSEEVVKKMKNYWRQLLNAKLITQRKFDNLTKAERGGLSELDKAGFIKRQLVETRQITKHVAQILDSRMNTKYDENDKLIREVKVITLKSKLVSDFRKDFQFYKVREINNYHHAHDAYLNAVVGTALIKKYPKLESEFVYGDYKVYDVRKMIAKSEQEIGKATAKYFFYSNIMNFFKTEITLANGEIRKRPLIETNGETGEIVWDKGRDFATVRKVLSMPQVNIVKKTEVQTGGFSKESILPKRNSDKLIARKKDWDPKKYGGFVSPTVAYSVLVVAKVEKGKSKKLKSVKELLGITIMERSSFEKNPIDFLEAKGYKEVKKDLIIKLPKYSLFELENGRKRMLASARELQKGNELALPSKYVNFLYLASHYEKLKGSPEDNEQKQLFVEQHKHYLDEIIEQISEFSKRVILADANLDKVLSAYNKHRDKPIREQAENIIHLFTLTNLGAPAAFKYFDTTIDRKQYRSTKEVLDATLIHQSITGLYETRIDLSQLGGD

SEQ ID NO: 603 - protein, 1368 aa, synthetic construct
  REGION 1..1368: note = Description of Artificial Sequence: Synthetic polypeptide
MDKKYSIGLDIGTNSVGWAVITDEYKVPSKKFKVLGNTDRHSIKKNLIGALLFDSGETAEATRLKRTARRRYTRRKNRICYLQEIFSNEMAKVDDSFFHRLEESFLVEEDKKHERHPIFGNIVDEVAYHEKYPTIYHLRKKLVDSTDKADLRLIYLALAHMIKFRGHFLIEGDLNPDNSDVDKLFIQLVQTYNQLFEENPINASGVDAKAILSARLSKSRRLENLIAQLPGEKKNGLFGNLIALSLGLTPNFKSNFDLAEDAKLQLSKDTYDDDLDNLLAQIGDQYADLFLAAKNLSDAILLSDILRVNTEITKAPLSASMIKRYDEHHQDLTLLKALVRQQLPEKYKEIFFDQSKNGYAGYIDGGASQEEFYKFIKPILEKMDGTEELLVKLNREDLLRKQRTFDNGSIPHQIHLGELHAILRRQEDFYPFLKDNREKIEKILTFRIPYYVGPLARGNSRFAWMTRKSEETITPWNFEEVVDKGASAQSFIERMTNFDKNLPNEKVLPKHSLLYEYFTVYNELTKVKYVTEGMRKPAFLSGEQKKAIVDLLFKTNRKVTVKQLKEDYFKKIECFDSVEISGVEDRFNASLGTYHDLLKIIKDKDFLDNEENEDILEDIVLTLTLFEDREMIEERLKTYAHLFDDKVMKQLKRRRYTGWGRLSRKLINGIRDKQSGKTILDFLKSDGFANRNFMQLIHDDSLTFKEDIQKAQVSGQGDSLHEHIANLAGSPAIKKGILQTVKVVDELVKVMGRHKPENIVIEMARENQTTQKGQKNSRERMKRIEEGIKELGSQILKEHPVENTQLQNEKLYLYYLQNGRDMYVDQELDINRLSDYDVDAIVPQSFLKDDSIDNKVLTRSDKNRGKSDNVPSEEVVKKMKNYWRQLLNAKLITQRKFDNLTKAERGGLSELDKAGFIKRQLVETRQITKHVAQILDSRMNTKYDENDKLIREVKVITLKSKLVSDFRKDFQFYKVREINNYHHAHDAYLNAVVGTALIKKYPKLESEFVYGDYKVYDVRKMIAKSEQEIGKATAKYFFYSNIMNFFKTEITLANGEIRKRPLIETNGETGEIVWDKGRDFATVRKVLSMPQVNIVKKTEVQTGGFSKESILPKRNSDKLIARKKDWDPKKYGGFVSPTVAYSVLVVAKVEKGKSKKLKSVKELLGITIMERSSFEKNPIDFLEAKGYKEVKKDLIIKLPKYSLFELENGRKRMLASARELQKGNELALPSKYVNFLYLASHYEKLKGSPEDNEQKQLFVEQHKHYLDEIIEQISEFSKRVILADANLDKVLSAYNKHRDKPIREQAENIIHLFTLTNLGAPAAFKYFDTTIDRKQYRSTKEVLDATLIHQSITGLYETRIDLSQLGGD

SEQ ID NO: 604 - protein, 1367 aa, synthetic construct
  REGION 1..1367: note = Description of Artificial Sequence: Synthetic polypeptide
DKKYSIGLDIGTNSVGWAVITDEYKVPSKKFKVLGNTDRHSIKKNLIGALLFDSGETAEATRLKRTARRRYTRRKNRICYLQEIFSNEMAKVDDSFFHRLEESFLVEEDKKHERHPIFGNIVDEVAYHEKYPTIYHLRKKLVDSTDKADLRLIYLALAHMIKFRGHFLIEGDLNPDNSDVDKLFIQLVQTYNQLFEENPINASGVDAKAILSARLSKSRRLENLIAQLPGEKKNGLFGNLIALSLGLTPNFKSNFDLAEDAKLQLSKDTYDDDLDNLLAQIGDQYADLFLAAKNLSDAILLSDILRVNTEITKAPLSASMIKRYDEHHQDLTLLKALVRQQLPEKYKEIFFDQSKNGYAGYIDGGASQEEFYKFIKPILEKMDGTEELLVKLNREDLLRKQRTFDNGSIPHQIHLGELHAILRRQEDFYPFLKDNREKIEKILTFRIPYYVGPLARGNSRFAWMTRKSEETITPWNFEEVVDKGASAQSFIERMTNFDKNLPNEKVLPKHSLLYEYFTVYNELTKVKYVTEGMRKPAFLSGEQKKAIVDLLFKTNRKVTVKQLKEDYFKKIECFDSVEISGVEDRFNASLGTYHDLLKIIKDKDFLDNEENEDILEDIVLTLTLFEDREMIEERLKTYAHLFDDKVMKQLKRRRYTGWGRLSRKLINGIRDKQSGKTILDFLKSDGFANRNFMQLIHDDSLTFKEDIQKAQVSGQGDSLHEHIANLAGSPAIKKGILQTVKVVDELVKVMGRHKPENIVIEMARENQTTQKGQKNSRERMKRIEEGIKELGSQILKEHPVENTQLQNEKLYLYYLQNGRDMYVDQELDINRLSDYDVDAIVPQSFLKDDSIDNKVLTRSDKNRGKSDNVPSEEVVKKMKNYWRQLLNAKLITQRKFDNLTKAERGGLSELDKAGFIKRQLVETRQITKHVAQILDSRMNTKYDENDKLIREVKVITLKSKLVSDFRKDFQFYKVREINNYHHAHDAYLNAVVGTALIKKYPKLESEFVYGDYKVYDVRKMIAKSEQEIGKATAKYFFYSNIMNFFKTEITLANGEIRKRPLIETNGETGEIVWDKGRDFATVRKVLSMPQVNIVKKTEVQTGGFSKESILPKRNSDKLIARKKDWDPKKYGGFVSPTVAYSVLVVAKVEKGKSKKLKSVKELLGITIMERSSFEKNPIDFLEAKGYKEVKKDLIIKLPKYSLFELENGRKRMLASARELQKGNELALPSKYVNFLYLASHYEKLKGSPEDNEQKQLFVEQHKHYLDEIIEQISEFSKRVILADANLDKVLSAYNKHRDKPIREQAENIIHLFTLTNLGAPAAFKYFDTTIDRKQYRSTKEVLDATLIHQSITGLYETRIDLSQLGGD

SEQ ID NO: 605 - protein, 1054 aa, synthetic construct
  REGION 1..1054: note = Description of Artificial Sequence: Synthetic polypeptide
MNQKFILGLDIGITSVGYGLIDYETKNIIDAGVRLFPEANVENNEGRRSKRGSRRLKRRRIHRLERVKKLLEDYNLLDQSQIPQSTNPYAIRVKGLSEALSKDELVIALLHIAKRRGIHKIDVIDSNDDVGNELSTKEQLNKNSKLLKDKFVCQIQLERMNEGQVRGEKNRFKTADIIKEIIQLLNVQKNFHQLDENFINKYIELVEMRREYFEGPGKGSPYGWEGDPKAWYETLMGHCTYFPDELRSVKYAYSADLFNALNDLNNLVIQRDGLSKLEYHEKYHIIENVFKQKKKPTLKQIANEINVNPEDIKGYRITKSGKPQFTEFKLYHDLKSVLFDQSILENEDVLDQIAEILTIYQDKDSIKSKLTELDILLNEEDKENIAQLTGYTGTHRLSLKCIRLVLEEQWYSSRNQMEIFTHLNIKPKKINLTAANKIPKAMIDEFILSPVVKRTFGQAINLINKIIEKYGVPEDIIIELARENNSKDKQKFINEMQKKNENTRKRINEIIGKYGNQNAKRLVEKIRLHDEQEGKCLYSLESIPLEDLLNNPNHYEVDHIIPRSVSFDNSYHNKVLVKQSENSKKSNLTPYQYFNSGKSKLSYNQFKQHILNLSKSQDRISKKKKEYLLEERDINKFEVQKEFINRNLVDTRYATRELTNYLKAYFSANNMNVKVKTINGSFTDYLRKVWKFKKERNHGYKHHAEDALIIANADFLFKENKKLKAVNSVLEKPEIESKQLDIQVDSEDNYSEMFIIPKQVQDIKDFRNFKYSHRVDKKPNRQLINDTLYSTRKKDNSTYIVQTIKDIYAKDNTTLKKQFDKSPEKFLMYQHDPRTFEKLEVIMKQYANEKNPLAKYHEETGEYLTKYSKKNNGPIVKSLKYIGNKLGSHLDVTHQFKSSTKKLVKLSIKPYRFDVYLTDKGYKFITISYLDVLKKDNYYYIPEQKYDKLKLGKAIDKNAKFIASFYKNDLIKLDGEIYKIIGVNSDTRNMIELDLPDIRYKEYCELNNIKGEPRIKKTIGKKVNSIEKLTTDVLGNVFTNTQYTKPQLLFKRGN

SEQ ID NO: 606 - protein, 1054 aa, synthetic construct
  REGION 1..1054: note = Description of Artificial Sequence: Synthetic polypeptide
MNQKFILGLDIGITSVGYGLIDYETKNIIDAGVRLFPEANVENNEGRRSKRGSRRLKRRRIHRLERVKKLLEDYNLLDQSQIPQSTNPYAIRVKGLSEALSKDELVIALLHIAKRRGIHKIDVIDSNDDVGNELSTKEQLNKNSKLLKDKFVCQIQLERMNEGQVRGEKNRFKTADIIKEIIQLLNVQKNFHQLDENFINKYIELVEMRREYFEGPGKGSPYGWEGDPKAWYETLMGHCTYFPDELRSVKYAYSADLFNALNDLNNLVIQRDGLSKLEYHEKYHIIENVFKQKKKPTLKQIANEINVNPEDIKGYRITKSGKPQFTEFKLYHDLKSVLFDQSILENEDVLDQIAEILTIYQDKDSIKSKLTELDILLNEEDKENIAQLTGYTGTHRLSLKCIRLVLEEQWYSSRNQMEIFTHLNIKPKKINLTAANKIPKAMIDEFILSPVVKRTFGQAINLINKIIEKYGVPEDIIIELARENNSKDKQKFINEMQKKNENTRKRINEIIGKYGNQNAKRLVEKIRLHDEQEGKCLYSLESIPLEDLLNNPNHYEVDHIIPRSVSFDNSYHNKVLVKQSEASKKSNLTPYQYFNSGKSKLSYNQFKQHILNLSKSQDRISKKKKEYLLEERDINKFEVQKEFINRNLVDTRYATRELTNYLKAYFSANNMNVKVKTINGSFTDYLRKVWKFKKERNHGYKHHAEDALIIANADFLFKENKKLKAVNSVLEKPEIESKQLDIQVDSEDNYSEMFIIPKQVQDIKDFRNFKYSHRVDKKPNRQLINDTLYSTRKKDNSTYIVQTIKDIYAKDNTTLKKQFDKSPEKFLMYQHDPRTFEKLEVIMKQYANEKNPLAKYHEETGEYLTKYSKKNNGPIVKSLKYIGNKLGSHLDVTHQFKSSTKKLVKLSIKPYRFDVYLTDKGYKFITISYLDVLKKDNYYYIPEQKYDKLKLGKAIDKNAKFIASFYKNDLIKLDGEIYKIIGVNSDTRNMIELDLPDIRYKEYCELNNIKGEPRIKKTIGKKVNSIEKLTTDVLGNVFTNTQYTKPQLLFKRGN

SEQ ID NO: 607 - protein, 1053 aa, synthetic construct
  REGION 1..1053: note = Description of Artificial Sequence: Synthetic polypeptide
NQKFILGLDIGITSVGYGLIDYETKNIIDAGVRLFPEANVENNEGRRSKRGSRRLKRRRIHRLERVKKLLEDYNLLDQSQIPQSTNPYAIRVKGLSEALSKDELVIALLHIAKRRGIHKIDVIDSNDDVGNELSTKEQLNKNSKLLKDKFVCQIQLERMNEGQVRGEKNRFKTADIIKEIIQLLNVQKNFHQLDENFINKYIELVEMRREYFEGPGKGSPYGWEGDPKAWYETLMGHCTYFPDELRSVKYAYSADLFNALNDLNNLVIQRDGLSKLEYHEKYHIIENVFKQKKKPTLKQIANEINVNPEDIKGYRITKSGKPQFTEFKLYHDLKSVLFDQSILENEDVLDQIAEILTIYQDKDSIKSKLTELDILLNEEDKENIAQLTGYTGTHRLSLKCIRLVLEEQWYSSRNQMEIFTHLNIKPKKINLTAANKIPKAMIDEFILSPVVKRTFGQAINLINKIIEKYGVPEDIIIELARENNSKDKQKFINEMQKKNENTRKRINEIIGKYGNQNAKRLVEKIRLHDEQEGKCLYSLESIPLEDLLNNPNHYEVDHIIPRSVSFDNSYHNKVLVKQSEASKKSNLTPYQYFNSGKSKLSYNQFKQHILNLSKSQDRISKKKKEYLLEERDINKFEVQKEFINRNLVDTRYATRELTNYLKAYFSANNMNVKVKTINGSFTDYLRKVWKFKKERNHGYKHHAEDALIIANADFLFKENKKLKAVNSVLEKPEIESKQLDIQVDSEDNYSEMFIIPKQVQDIKDFRNFKYSHRVDKKPNRQLINDTLYSTRKKDNSTYIVQTIKDIYAKDNTTLKKQFDKSPEKFLMYQHDPRTFEKLEVIMKQYANEKNPLAKYHEETGEYLTKYSKKNNGPIVKSLKYIGNKLGSHLDVTHQFKSSTKKLVKLSIKPYRFDVYLTDKGYKFITISYLDVLKKDNYYYIPEQKYDKLKLGKAIDKNAKFIASFYKNDLIKLDGEIYKIIGVNSDTRNMIELDLPDIRYKEYCELNNIKGEPRIKKTIGKKVNSIEKLTTDVLGNVFTNTQYTKPQLLFKRGN

SEQ ID NO: 608 - protein, 1368 aa, synthetic construct
  REGION 1..1368: note = Description of Artificial Sequence: Synthetic polypeptide
MDKKYSIGLDIGTNSVGWAVITDEYKVPSKKFKVLGNTDRHSIKKNLIGALLFDSGETAERTRLKRTARRRYTRRKNRICYLQEIFSNEMAKVDDSFFHRLEESFLVEEDKKHERHPIFGNIVDEVAYHEKYPTIYHLRKKLVDSTDKADLRLIYLALAHMIKFRGHFLIEGDLNPDNSDVDKLFIQLVQTYNQLFEENPINASGVDAKAILSARLSKSRRLENLIAQLPGEKKNGLFGNLIALSLGLTPNFKSNFDLAEDAKLQLSKDTYDDDLDNLLAQIGDQYADLFLAAKNLSDAILLSDILRVNTEITKAPLSASMIKRYDEHHQDLTLLKALVRQQLPEKYKEIFFDQSKNGYAGYIDGGASQEEFYKFIKPILEKMDGTEELLVKLNREDLLRKQRTFDNGSIPHQIHLGELHAILRRQEDFYPFLKDNREKIEKILTFRIPYYVGPLARGNSRFAWMTRKSEETITPWNFEEVVDKGASAQSFIERMTNFDKNLPNEKVLPKHSLLYEYFTVYNELTKVKYVTEGMRKPAFLSGEQKKAIVDLLFKTNRKVTVKQLKEDYFKKIECFDSVEISGVEDRFNASLGTYHDLLKIIKDKDFLDNEENEDILEDIVLTLTLFEDREMIEERLKTYAHLFDDKVMKQLKRRRYTGWGRLSRKLINGIRDKQSGKTILDFLKSDGFANRNFMQLIHDDSLTFKEDIQKAQVSGQGDSLHEHIANLAGSPAIKKGILQTVKVVDELVKVMGRHKPENIVIEMARENQTTQKGQKNSRERMKRIEEGIKELGSQILKEHPVENTQLQNEKLYLYYLQNGRDMYVDQELDINRLSDYDVDHIVPQSFLKDDSIDNKVLTRSDKNRGKSDNVPSEEVVKKMKNYWRQLLNAKLITQRKFDNLTKAERGGLSELDKAGFIKRQLVETRQITKHVAQILDSRMNTKYDENDKLIREVKVITLKSKLVSDFRKDFQFYKVREINNYHHAHDAYLNAVVGTALIKKYPKLESEFVYGDYKVYDVRKMIAKSEQEIGKATAKYFFYSNIMNFFKTEITLANGEIRKRPLIETNGETGEIVWDKGRDFATVRKVLSMPQVNIVKKTEVQTGGFSKESIRPKRNSDKLIARKKDWDPKKYGGFLWPTVAYSVLVVAKVEKGKSKKLKSVKELLGITIMERSSFEKNPIDFLEAKGYKEVKKDLIIKLPKYSLFELENGRKRMLASAKQLQKGNELALPSKYVNFLYLASHYEKLKGSPEDNEQKQLFVEQHKHYLDEIIEQISEFSKRVILADANLDKVLSAYNKHRDKPIREQAENIIHLFTLTRLGAPRAFKYFDTTIDPKQYRSTKEVLDATLIHQSITGLYETRIDLSQLGGD

SEQ ID NO: 609 - protein, 1368 aa, synthetic construct
  REGION 1..1368: note = Description of Artificial Sequence: Synthetic polypeptide
MDKKYSIGLDIGTNSVGWAVITDEYKVPSKKFKVLGNTDRHSIKKNLIGALLFDSGETAERTRLKRTARRRYTRRKNRICYLQEIFSNEMAKVDDSFFHRLEESFLVEEDKKHERHPIFGNIVDEVAYHEKYPTIYHLRKKLVDSTDKADLRLIYLALAHMIKFRGHFLIEGDLNPDNSDVDKLFIQLVQTYNQLFEENPINASGVDAKAILSARLSKSRRLENLIAQLPGEKKNGLFGNLIALSLGLTPNFKSNFDLAEDAKLQLSKDTYDDDLDNLLAQIGDQYADLFLAAKNLSDAILLSDILRVNTEITKAPLSASMIKRYDEHHQDLTLLKALVRQQLPEKYKEIFFDQSKNGYAGYIDGGASQEEFYKFIKPILEKMDGTEELLVKLNREDLLRKQRTFDNGSIPHQIHLGELHAILRRQEDFYPFLKDNREKIEKILTFRIPYYVGPLARGNSRFAWMTRKSEETITPWNFEEVVDKGASAQSFIERMTNFDKNLPNEKVLPKHSLLYEYFTVYNELTKVKYVTEGMRKPAFLSGEQKKAIVDLLFKTNRKVTVKQLKEDYFKKIECFDSVEISGVEDRFNASLGTYHDLLKIIKDKDFLDNEENEDILEDIVLTLTLFEDREMIEERLKTYAHLFDDKVMKQLKRRRYTGWGRLSRKLINGIRDKQSGKTILDFLKSDGFANRNFMQLIHDDSLTFKEDIQKAQVSGQGDSLHEHIANLAGSPAIKKGILQTVKVVDELVKVMGRHKPENIVIEMARENQTTQKGQKNSRERMKRIEEGIKELGSQILKEHPVENTQLQNEKLYLYYLQNGRDMYVDQELDINRLSDYDVDAIVPQSFLKDDSIDNKVLTRSDKNRGKSDNVPSEEVVKKMKNYWRQLLNAKLITQRKFDNLTKAERGGLSELDKAGFIKRQLVETRQITKHVAQILDSRMNTKYDENDKLIREVKVITLKSKLVSDFRKDFQFYKVREINNYHHAHDAYLNAVVGTALIKKYPKLESEFVYGDYKVYDVRKMIAKSEQEIGKATAKYFFYSNIMNFFKTEITLANGEIRKRPLIETNGETGEIVWDKGRDFATVRKVLSMPQVNIVKKTEVQTGGFSKESIRPKRNSDKLIARKKDWDPKKYGGFLWPTVAYSVLVVAKVEKGKSKKLKSVKELLGITIMERSSFEKNPIDFLEAKGYKEVKKDLIIKLPKYSLFELENGRKRMLASAKQLQKGNELALPSKYVNFLYLASHYEKLKGSPEDNEQKQLFVEQHKHYLDEIIEQISEFSKRVILADANLDKVLSAYNKHRDKPIREQAENIIHLFTLTRLGAPRAFKYFDTTIDPKQYRSTKEVLDATLIHQSITGLYETRIDLSQLGGD

SEQ ID NO: 610 - protein, 1367 aa, synthetic construct
  REGION 1..1367: note = Description of Artificial Sequence: Synthetic polypeptide
DKKYSIGLDIGTNSVGWAVITDEYKVPSKKFKVLGNTDRHSIKKNLIGALLFDSGETAERTRLKRTARRRYTRRKNRICYLQEIFSNEMAKVDDSFFHRLEESFLVEEDKKHERHPIFGNIVDEVAYHEKYPTIYHLRKKLVDSTDKADLRLIYLALAHMIKFRGHFLIEGDLNPDNSDVDKLFIQLVQTYNQLFEENPINASGVDAKAILSARLSKSRRLENLIAQLPGEKKNGLFGNLIALSLGLTPNFKSNFDLAEDAKLQLSKDTYDDDLDNLLAQIGDQYADLFLAAKNLSDAILLSDILRVNTEITKAPLSASMIKRYDEHHQDLTLLKALVRQQLPEKYKEIFFDQSKNGYAGYIDGGASQEEFYKFIKPILEKMDGTEELLVKLNREDLLRKQRTFDNGSIPHQIHLGELHAILRRQEDFYPFLKDNREKIEKILTFRIPYYVGPLARGNSRFAWMTRKSEETITPWNFEEVVDKGASAQSFIERMTNFDKNLPNEKVLPKHSLLYEYFTVYNELTKVKYVTEGMRKPAFLSGEQKKAIVDLLFKTNRKVTVKQLKEDYFKKIECFDSVEISGVEDRFNASLGTYHDLLKIIKDKDFLDNEENEDILEDIVLTLTLFEDREMIEERLKTYAHLFDDKVMKQLKRRRYTGWGRLSRKLINGIRDKQSGKTILDFLKSDGFANRNFMQLIHDDSLTFKEDIQKAQVSGQGDSLHEHIANLAGSPAIKKGILQTVKVVDELVKVMGRHKPENIVIEMARENQTTQKGQKNSRERMKRIEEGIKELGSQILKEHPVENTQLQNEKLYLYYLQNGRDMYVDQELDINRLSDYDVDAIVPQSFLKDDSIDNKVLTRSDKNRGKSDNVPSEEVVKKMKNYWRQLLNAKLITQRKFDNLTKAERGGLSELDKAGFIKRQLVETRQITKHVAQILDSRMNTKYDENDKLIREVKVITLKSKLVSDFRKDFQFYKVREINNYHHAHDAYLNAVVGTALIKKYPKLESEFVYGDYKVYDVRKMIAKSEQEIGKATAKYFFYSNIMNFFKTEITLANGEIRKRPLIETNGETGEIVWDKGRDFATVRKVLSMPQVNIVKKTEVQTGGFSKESIRPKRNSDKLIARKKDWDPKKYGGFLWPTVAYSVLVVAKVEKGKSKKLKSVKELLGITIMERSSFEKNPIDFLEAKGYKEVKKDLIIKLPKYSLFELENGRKRMLASAKQLQKGNELALPSKYVNFLYLASHYEKLKGSPEDNEQKQLFVEQHKHYLDEIIEQISEFSKRVILADANLDKVLSAYNKHRDKPIREQAENIIHLFTLTRLGAPRAFKYFDTTIDPKQYRSTKEVLDATLIHQSITGLYETRIDLSQLGGD

SEQ ID NO: 611 - protein, 1368 aa, synthetic construct
  REGION 1..1368: note = Description of Artificial Sequence: Synthetic polypeptide
MDKKYSIGLDIGTNSVGWAVITDEYKVPSKKFKVLGNTDRHSIKKNLIGALLFDSGETAEATRLKRTARRRYTRRKNRICYLQEIFSNEMAKVDDSFFHRLEESFLVEEDKKHERHPIFGNIVDEVAYHEKYPTIYHLRKKLVDSTDKADLRLIYLALAHMIKFRGHFLIEGDLNPDNSDVDKLFIQLVQTYNQLFEENPINASGVDAKAILSARLSKSRRLENLIAQLPGEKKNGLFGNLIALSLGLTPNFKSNFDLAEDAKLQLSKDTYDDDLDNLLAQIGDQYADLFLAAKNLSDAILLSDILRVNTEITKAPLSASMIKRYDEHHQDLTLLKALVRQQLPEKYKEIFFDQSKNGYAGYIDGGASQEEFYKFIKPILEKMDGTEELLVKLNREDLLRKQRTFDNGSIPHQIHLGELHAILRRQEDFYPFLKDNREKIEKILTFRIPYYVGPLARGNSRFAWMTRKSEETITPWNFEEVVDKGASAQSFIERMTNFDKNLPNEKVLPKHSLLYEYFTVYNELTKVKYVTEGMRKPAFLSGEQKKAIVDLLFKTNRKVTVKQLKEDYFKKIECFDSVEISGVEDRFNASLGTYHDLLKIIKDKDFLDNEENEDILEDIVLTLTLFEDREMIEERLKTYAHLFDDKVMKQLKRRRYTGWGRLSRKLINGIRDKQSGKTILDFLKSDGFANRNFMQLIHDDSLTFKEDIQKAQVSGQGDSLHEHIANLAGSPAIKKGILQTVKVVDELVKVMGRHKPENIVIEMARENQTTQKGQKNSRERMKRIEEGIKELGSQILKEHPVENTQLQNEKLYLYYLQNGRDMYVDQELDINRLSDYDVDHIVPQSFLKDDSIDNKVLTRSDKNRGKSDNVPSEEVVKKMKNYWRQLLNAKLITQRKFDNLTKAERGGLSELDKAGFIKRQLVETRQITKHVAQILDSRMNTKYDENDKLIREVKVITLKSKLVSDFRKDFQFYKVREINNYHHAHDAYLNAVVGTALIKKYPKLESEFVYGDYKVYDVRKMIAKSEQEIGKATAKYFFYSNIMNFFKTEITLANGEIRKRPLIETNGETGEIVWDKGRDFATVRKVLSMPQVNIVKKTEVQTGGFSKESILPKRNSDKLIARKKDWDPKKYGGFLWPTVAYSVLVVAKVEKGKSKKLKSVKELLGITIMERSSFEKNPIDFLEAKGYKEVKKDLIIKLPKYSLFELENGRKRMLASAKQLQKGNELALPSKYVNFLYLASHYEKLKGSPEDNEQKQLFVEQHKHYLDEIIEQISEFSKRVILADANLDKVLSAYNKHRDKPIREQAENIIHLFTLTNLGAPAAFKYFDTTIDRKQYRSTKEVLDATLIHQSITGLYETRIDLSQLGGD

SEQ ID NO: 612 - protein, 1368 aa, synthetic construct
  REGION 1..1368: note = Description of Artificial Sequence: Synthetic polypeptide
MDKKYSIGLDIGTNSVGWAVITDEYKVPSKKFKVLGNTDRHSIKKNLIGALLFDSGETAEATRLKRTARRRYTRRKNRICYLQEIFSNEMAKVDDSFFHRLEESFLVEEDKKHERHPIFGNIVDEVAYHEKYPTIYHLRKKLVDSTDKADLRLIYLALAHMIKFRGHFLIEGDLNPDNSDVDKLFIQLVQTYNQLFEENPINASGVDAKAILSARLSKSRRLENLIAQLPGEKKNGLFGNLIALSLGLTPNFKSNFDLAEDAKLQLSKDTYDDDLDNLLAQIGDQYADLFLAAKNLSDAILLSDILRVNTEITKAPLSASMIKRYDEHHQDLTLLKALVRQQLPEKYKEIFFDQSKNGYAGYIDGGASQEEFYKFIKPILEKMDGTEELLVKLNREDLLRKQRTFDNGSIPHQIHLGELHAILRRQEDFYPFLKDNREKIEKILTFRIPYYVGPLARGNSRFAWMTRKSEETITPWNFEEVVDKGASAQSFIERMTNFDKNLPNEKVLPKHSLLYEYFTVYNELTKVKYVTEGMRKPAFLSGEQKKAIVDLLFKTNRKVTVKQLKEDYFKKIECFDSVEISGVEDRFNASLGTYHDLLKIIKDKDFLDNEENEDILEDIVLTLTLFEDREMIEERLKTYAHLFDDKVMKQLKRRRYTGWGRLSRKLINGIRDKQSGKTILDFLKSDGFANRNFMQLIHDDSLTFKEDIQKAQVSGQGDSLHEHIANLAGSPAIKKGILQTVKVVDELVKVMGRHKPENIVIEMARENQTTQKGQKNSRERMKRIEEGIKELGSQILKEHPVENTQLQNEKLYLYYLQNGRDMYVDQELDINRLSDYDVDAIVPQSFLKDDSIDNKVLTRSDKNRGKSDNVPSEEVVKKMKNYWRQLLNAKLITQRKFDNLTKAERGGLSELDKAGFIKRQLVETRQITKHVAQILDSRMNTKYDENDKLIREVKVITLKSKLVSDFRKDFQFYKVREINNYHHAHDAYLNAVVGTALIKKYPKLESEFVYGDYKVYDVRKMIAKSEQEIGKATAKYFFYSNIMNFFKTEITLANGEIRKRPLIETNGETGEIVWDKGRDFATVRKVLSMPQVNIVKKTEVQTGGFSKESILPKRNSDKLIARKKDWDPKKYGGFLWPTVAYSVLVVAKVEKGKSKKLKSVKELLGITIMERSSFEKNPIDFLEAKGYKEVKKDLIIKLPKYSLFELENGRKRMLASAKQLQKGNELALPSKYVNFLYLASHYEKLKGSPEDNEQKQLFVEQHKHYLDEIIEQISEFSKRVILADANLDKVLSAYNKHRDKPIREQAENIIHLFTLTNLGAPAAFKYFDTTIDRKQYRSTKEVLDATLIHQSITGLYETRIDLSQLGGD

SEQ ID NO: 613 - protein, 1367 aa, synthetic construct
  REGION 1..1367: note = Description of Artificial Sequence: Synthetic polypeptide
DKKYSIGLDIGTNSVGWAVITDEYKVPSKKFKVLGNTDRHSIKKNLIGALLFDSGETAEATRLKRTARRRYTRRKNRICYLQEIFSNEMAKVDDSFFHRLEESFLVEEDKKHERHPIFGNIVDEVAYHEKYPTIYHLRKKLVDSTDKADLRLIYLALAHMIKFRGHFLIEGDLNPDNSDVDKLFIQLVQTYNQLFEENPINASGVDAKAILSARLSKSRRLENLIAQLPGEKKNGLFGNLIALSLGLTPNFKSNFDLAEDAKLQLSKDTYDDDLDNLLAQIGDQYADLFLAAKNLSDAILLSDILRVNTEITKAPLSASMIKRYDEHHQDLTLLKALVRQQLPEKYKEIFFDQSKNGYAGYIDGGASQEEFYKFIKPILEKMDGTEELLVKLNREDLLRKQRTFDNGSIPHQIHLGELHAILRRQEDFYPFLKDNREKIEKILTFRIPYYVGPLARGNSRFAWMTRKSEETITPWNFEEVVDKGASAQSFIERMTNFDKNLPNEKVLPKHSLLYEYFTVYNELTKVKYVTEGMRKPAFLSGEQKKAIVDLLFKTNRKVTVKQLKEDYFKKIECFDSVEISGVEDRFNASLGTYHDLLKIIKDKDFLDNEENEDILEDIVLTLTLFEDREMIEERLKTYAHLFDDKVMKQLKRRRYTGWGRLSRKLINGIRDKQSGKTILDFLKSDGFANRNFMQLIHDDSLTFKEDIQKAQVSGQGDSLHEHIANLAGSPAIKKGILQTVKVVDELVKVMGRHKPENIVIEMARENQTTQKGQKNSRERMKRIEEGIKELGSQILKEHPVENTQLQNEKLYLYYLQNGRDMYVDQELDINRLSDYDVDAIVPQSFLKDDSIDNKVLTRSDKNRGKSDNVPSEEVVKKMKNYWRQLLNAKLITQRKFDNLTKAERGGLSELDKAGFIKRQLVETRQITKHVAQILDSRMNTKYDENDKLIREVKVITLKSKLVSDFRKDFQFYKVREINNYHHAHDAYLNAVVGTALIKKYPKLESEFVYGDYKVYDVRKMIAKSEQEIGKATAKYFFYSNIMNFFKTEITLANGEIRKRPLIETNGETGEIVWDKGRDFATVRKVLSMPQVNIVKKTEVQTGGFSKESILPKRNSDKLIARKKDWDPKKYGGFLWPTVAYSVLVVAKVEKGKSKKLKSVKELLGITIMERSSFEKNPIDFLEAKGYKEVKKDLIIKLPKYSLFELENGRKRMLASAKQLQKGNELALPSKYVNFLYLASHYEKLKGSPEDNEQKQLFVEQHKHYLDEIIEQISEFSKRVILADANLDKVLSAYNKHRDKPIREQAENIIHLFTLTNLGAPAAFKYFDTTIDRKQYRSTKEVLDATLIHQSITGLYETRIDLSQLGGD

SEQ ID NO: 614-619 - skipped (6 entries)

SEQ ID NO: 620 - protein, 2115 aa, synthetic construct
  REGION 1..2115: note = Description of Artificial Sequence: Synthetic polypeptide
KRTADGSEFESPKKKRKVDKKYSIGLDIGTNSVGWAVITDEYKVPSKKFKVLGNTDRHSIKKNLIGALLFDSGETAEATRLKRTARRRYTRRKNRICYLQEIFSNEMAKVDDSFFHRLEESFLVEEDKKHERHPIFGNIVDEVAYHEKYPTIYHLRKKLVDSTDKADLRLIYLALAHMIKFRGHFLIEGDLNPDNSDVDKLFIQLVQTYNQLFEENPINASGVDAKAILSARLSKSRRLENLIAQLPGEKKNGLFGNLIALSLGLTPNFKSNFDLAEDAKLQLSKDTYDDDLDNLLAQIGDQYADLFLAAKNLSDAILLSDILRVNTEITKAPLSASMIKRYDEHHQDLTLLKALVRQQLPEKYKEIFFDQSKNGYAGYIDGGASQEEFYKFIKPILEKMDGTEELLVKLNREDLLRKQRTFDNGSIPHQIHLGELHAILRRQEDFYPFLKDNREKIEKILTFRIPYYVGPLARGNSRFAWMTRKSEETITPWNFEEVVDKGASAQSFIERMTNFDKNLPNEKVLPKHSLLYEYFTVYNELTKVKYVTEGMRKPAFLSGEQKKAIVDLLFKTNRKVTVKQLKEDYFKKIECFDSVEISGVEDRFNASLGTYHDLLKIIKDKDFLDNEENEDILEDIVLTLTLFEDREMIEERLKTYAHLFDDKVMKQLKRRRYTGWGRLSRKLINGIRDKQSGKTILDFLKSDGFANRNFMQLIHDDSLTFKEDIQKAQVSGQGDSLHEHIANLAGSPAIKKGILQTVKVVDELVKVMGRHKPENIVIEMARENQTTQKGQKNSRERMKRIEEGIKELGSQILKEHPVENTQLQNEKLYLYYLQNGRDMYVDQELDINRLSDYDVDAIVPQSFLKDDSIDNKVLTRSDKNRGKSDNVPSEEVVKKMKNYWRQLLNAKLITQRKFDNLTKAERGGLSELDKAGFIKRQLVETRQITKHVAQILDSRMNTKYDENDKLIREVKVITLKSKLVSDFRKDFQFYKVREINNYHHAHDAYLNAVVGTALIKKYPKLESEFVYGDYKVYDVRKMIAKSEQEIGKATAKYFFYSNIMNFFKTEITLANGEIRKRPLIETNGETGEIVWDKGRDFATVRKVLSMPQVNIVKKTEVQTGGFSKESILPKRNSDKLIARKKDWDPKKYGGFDSPTVAYSVLVVAKVEKGKSKKLKSVKELLGITIMERSSFEKNPIDFLEAKGYKEVKKDLIIKLPKYSLFELENGRKRMLASAGELQKGNELALPSKYVNFLYLASHYEKLKGSPEDNEQKQLFVEQHKHYLDEIIEQISEFSKRVILADANLDKVLSAYNKHRDKPIREQAENIIHLFTLTNLGAPAAFKYFDTTIDRKRYTSTKEVLDATLIHQSITGLYETRIDLSQLGGDSGGSSGGSSGGSSGGSSGGSSGGSSGGSSGGSTLNIEDEYRLHETSKEPDVSLGSTWLSDFPQAWAETGGMGLAVRQAPLIIPLKATSTPVSIKQYPMSQEARLGIKPHIQRLLDQGILVPCQSPWNTPLLPVKKPGTNDYRPVQDLREVNKRVEDIHPTVPNPYNLLSGLPPSHQWYTVLDLKDAFFCLRLHPTSQPLFAFEWRDPEMGISGQLTWTRLPQGFKNSPTLFNEALHRDLADFRIQHPDLILLQYVDDLLLAATSELDCQQGTRALLQTLGNLGYRASAKKAQICQKQVKYLGYLLKEGQRWLTEARKETVMGQPTPKTPRQLREFLGKAGFCRLFIPGFAEMAAPLYPLTKPGTLFNWGPDQQKAYQEIKQALLTAPALGLPDLTKPFELFVDEKQGYAKGVLTQKLGPWRRPVAYLSKKLDPVAAGWPPCLRMVAAIAVLTKDAGKLTMGQPLVILAPHAVEALVKQPPDRWLSNARMTHYQALLLDTDRVQFGPVVALNPATLLPLPEEGLQHNCLDILAEAHGTRPDLTDQPLPDADHTWYTDGSSLLQEGQRKAGAAVTTETEVIWAKALPAGTSAQRAELIALTQALKMAEGKKLNVYTDSRYAFATAHIHGEIYRRRGWLTSEGKEIKNKDEILALLKALFLPKRLSIIHCPGHQKGHSAEARGNRMADQAARKAAITETPDTSTLLIENSSPSGGSKRTADGSEFEPKKKRKV

SEQ ID NO: 621 - protein, 30 aa, synthetic construct
  REGION 1..30: note = Description of Artificial Sequence: Synthetic polypeptide
MPAAKRVKLDGGKRTADGSEFESPKKKRKV

SEQ ID NO: 622 - protein, 1942 aa, synthetic construct
  REGION 1..1942: note = Description of Artificial Sequence: Synthetic polypeptide
KRTADGSEFESPKKKRKVDKKYSIGLDIGTNSVGWAVITDEYKVPSKKFKVLGNTDRHSIKKNLIGALLFDSGETAEATRLKRTARRRYTRRKNRICYLQEIFSNEMAKVDDSFFHRLEESFLVEEDKKHERHPIFGNIVDEVAYHEKYPTIYHLRKKLVDSTDKADLRLIYLALAHMIKFRGHFLIEGDLNPDNSDVDKLFIQLVQTYNQLFEENPINASGVDAKAILSARLSKSRRLENLIAQLPGEKKNGLFGNLIALSLGLTPNFKSNFDLAEDAKLQLSKDTYDDDLDNLLAQIGDQYADLFLAAKNLSDAILLSDILRVNTEITKAPLSASMIKRYDEHHQDLTLLKALVRQQLPEKYKEIFFDQSKNGYAGYIDGGASQEEFYKFIKPILEKMDGTEELLVKLNREDLLRKQRTFDNGSIPHQIHLGELHAILRRQEDFYPFLKDNREKIEKILTFRIPYYVGPLARGNSRFAWMTRKSEETITPWNFEEVVDKGASAQSFIERMTNFDKNLPNEKVLPKHSLLYEYFTVYNELTKVKYVTEGMRKPAFLSGEQKKAIVDLLFKTNRKVTVKQLKEDYFKKIECFDSVEISGVEDRFNASLGTYHDLLKIIKDKDFLDNEENEDILEDIVLTLTLFEDREMIEERLKTYAHLFDDKVMKQLKRRRYTGWGRLSRKLINGIRDKQSGKTILDFLKSDGFANRNFMQLIHDDSLTFKEDIQKAQVSGQGDSLHEHIANLAGSPAIKKGILQTVKVVDELVKVMGRHKPENIVIEMARENQTTQKGQKNSRERMKRIEEGIKELGSQILKEHPVENTQLQNEKLYLYYLQNGRDMYVDQELDINRLSDYDVDAIVPQSFLKDDSIDNKVLTRSDKNRGKSDNVPSEEVVKKMKNYWRQLLNAKLITQRKFDNLTKAERGGLSELDKAGFIKRQLVETRQITKHVAQILDSRMNTKYDENDKLIREVKVITLKSKLVSDFRKDFQFYKVREINNYHHAHDAYLNAVVGTALIKKYPKLESEFVYGDYKVYDVRKMIAKSEQEIGKATAKYFFYSNIMNFFKTEITLANGEIRKRPLIETNGETGEIVWDKGRDFATVRKVLSMPQVNIVKKTEVQTGGFSKESILPKRNSDKLIARKKDWDPKKYGGFDSPTVAYSVLVVAKVEKGKSKKLKSVKELLGITIMERSSFEKNPIDFLEAKGYKEVKKDLIIKLPKYSLFELENGRKRMLASAGELQKGNELALPSKYVNFLYLASHYEKLKGSPEDNEQKQLFVEQHKHYLDEIIEQISEFSKRVILADANLDKVLSAYNKHRDKPIREQAENIIHLFTLTNLGAPAAFKYFDTTIDRKRYTSTKEVLDATLIHQSITGLYETRIDLSQLGGDSGGSSGGSSGGSSGGSSGGSSGGSSGGSSGGSTLNIEDEYRLHETSKEPDVSLGSTWLSDFPQAWAETGGMGLAVRQAPLIIPLKATSTPVSIKQYPMSQEARLGIKPHIQRLLDQGILVPCQSPWNTPLLPVKKPGTNDYRPVQDLREVNKRVEDIHPTVPNPYNLLSGLPPSHQWYTVLDLKDAFFCLRLHPTSQPLFAFEWRDPEMGISGQLTWTRLPQGFKNSPTLFNEALHRDLADFRIQHPDLILLQYVDDLLLAATSELDCQQGTRALLQTLGNLGYRASAKKAQICQKQVKYLGYLLKEGQRWLTEARKETVMGQPTPKTPRQLREFLGKAGFCRLFIPGFAEMAAPLYPLTKPGTLFNWGPDQQKAYQEIKQALLTAPALGLPDLTKPFELFVDEKQGYAKGVLTQKLGPWRRPVAYLSKKLDPVAAGWPPCLRMVAAIAVLTKDAGKLTMGQPLVILAPHAVEALVKQPPDRWLSNARMTHYQALLLDTDRVQFGPVVALNPATLLPLPEEGLQHNCLDILAEAHGSGGSKRTADGSEFEPKKKRKV

SEQ ID NO: 623 - protein, 677 aa, Moloney murine leukemia virus
TLNIEDEHRLHETSKEPDVSLGSTWLSDFPQAWAETGGMGLAVRQAPLIIPLKATSTPVSIKQYPMSQEARLGIKPHIQRLLDQGILVPCQSPWNTPLLPVKKPGTNDYRPVQDLREVNKRVEDIHPTVPNPYNLLSGLPPSHQWYTVLDLKDAFFCLRLHPTSQPLFAFEWRDPEMGISGQLTWTRLPQGFKNSPTLFDEALHRDLADFRIQHPDLILLQYVDDLLLAATSELDCQQGTRALLQTLGNLGYRASAKKAQICQKQVKYLGYLLKEGQRWLTEARKETVMGQPTPKTPRQLREFLGTAGFCRLWIPGFAEMAAPLYPLTKTGTLFNWGPDQQKAYQEIKQALLTAPALGLPDLTKPFELFVDEKQGYAKGVLTQKLGPWRRPVAYLSKKLDPVAAGWPPCLRMVAAIAVLTKDAGKLTMGQPLVILAPHAVEALVKQPPDRWLSNARMTHYQALLLDTDRVQFGPVVALNPATLLPLPEEGLQHNCLDILAEAHGTRPDLTDQPLPDADHTWYTDGSSLLQEGQRKAGAAVTTETEVIWAKALPAGTSAQRAELIALTQALKMAEGKKLNVYTDSRYAFATAHIHGEIYRRRGLLTSEGKEIKNKDEILALLKALFLPKRLSIIHCPGHQKGHSAEARGNRMADQAARKAAITETPDTSTLLIENSSP

SEQ ID NO: 624 - protein, 2116 aa, synthetic construct
  REGION 1..2116: note = Description of Artificial Sequence: Synthetic polypeptide
KRTADGSEFESPKKKRKVDKKYSIGLDIGTNSVGWAVITDEYKVPSKKFKVLGNTDRHSIKKNLIGALLFDSGETAEATRLKRTARRRYTRRKNRICYLQEIFSNEMAKVDDSFFHRLEESFLVEEDKKHERHPIFGNIVDEVAYHEKYPTIYHLRKKLVDSTDKADLRLIYLALAHMIKFRGHFLIEGDLNPDNSDVDKLFIQLVQTYNQLFEENPINASGVDAKAILSARLSKSRRLENLIAQLPGEKKNGLFGNLIALSLGLTPNFKSNFDLAEDAKLQLSKDTYDDDLDNLLAQIGDQYADLFLAAKNLSDAILLSDILRVNTEITKAPLSASMIKRYDEHHQDLTLLKALVRQQLPEKYKEIFFDQSKNGYAGYIDGGASQEEFYKFIKPILEKMDGTEELLVKLNREDLLRKQRTFDNGSIPHQIHLGELHAILRRQEDFYPFLKDNREKIEKILTFRIPYYVGPLARGNSRFAWMTRKSEETITPWNFEEVVDKGASAQSFIERMTNFDKNLPNEKVLPKHSLLYEYFTVYNELTKVKYVTEGMRKPAFLSGEQKKAIVDLLFKTNRKVTVKQLKEDYFKKIECFDSVEISGVEDRFNASLGTYHDLLKIIKDKDFLDNEENEDILEDIVLTLTLFEDREMIEERLKTYAHLFDDKVMKQLKRRRYTGWGRLSRKLINGIRDKQSGKTILDFLKSDGFANRNFMQLIHDDSLTFKEDIQKAQVSGQGDSLHEHIANLAGSPAIKKGILQTVKVVDELVKVMGRHKPENIVIEMARENQTTQKGQKNSRERMKRIEEGIKELGSQILKEHPVENTQLQNEKLYLYYLQNGRDMYVDQELDINRLSDYDVDAIVPQSFLKDDSIDNKVLTRSDKNRGKSDNVPSEEVVKKMKNYWRQLLNAKLITQRKFDNLTKAERGGLSELDKAGFIKRQLVETRQITKHVAQILDSRMNTKYDENDKLIREVKVITLKSKLVSDFRKDFQFYKVREINNYHHAHDAYLNAVVGTALIKKYPKLESEFVYGDYKVYDVRKMIAKSEQEIGKATAKYFFYSNIMNFFKTEITLANGEIRKRPLIETNGETGEIVWDKGRDFATVRKVLSMPQVNIVKKTEVQTGGFSKESILPKRNSDKLIARKKDWDPKKYGGFDSPTVAYSVLVVAKVEKGKSKKLKSVKELLGITIMERSSFEKNPIDFLEAKGYKEVKKDLIIKLPKYSLFELENGRKRMLASAGELQKGNELALPSKYVNFLYLASHYEKLKGSPEDNEQKQLFVEQHKHYLDEIIEQISEFSKRVILADANLDKVLSAYNKHRDKPIREQAENIIHLFTLTNLGAPAAFKYFDTTIDRKRYTSTKEVLDATLIHQSITGLYETRIDLSQLGGDSGGSSGGSSGSETPGTSESATPESSGGSSGGSSTLNIEDEYRLHETSKEPDVSLGSTWLSDFPQAWAETGGMGLAVRQAPLIIPLKATSTPVSIKQYPMSQEARLGIKPHIQRLLDQGILVPCQSPWNTPLLPVKKPGTNDYRPVQDLREVNKRVEDIHPTVPNPYNLLSGLPPSHQWYTVLDLKDAFFCLRLHPTSQPLFAFEWRDPEMGISGQLTWTRLPQGFKNSPTLFNEALHRDLADFRIQHPDLILLQYVDDLLLAATSELDCQQGTRALLQTLGNLGYRASAKKAQICQKQVKYLGYLLKEGQRWLTEARKETVMGQPTPKTPRQLREFLGKAGFCRLFIPGFAEMAAPLYPLTKPGTLFNWGPDQQKAYQEIKQALLTAPALGLPDLTKPFELFVDEKQGYAKGVLTQKLGPWRRPVAYLSKKLDPVAAGWPPCLRMVAAIAVLTKDAGKLTMGQPLVILAPHAVEALVKQPPDRWLSNARMTHYQALLLDTDRVQFGPVVALNPATLLPLPEEGLQHNCLDILAEAHGTRPDLTDQPLPDADHTWYTDGSSLLQEGQRKAGAAVTTETEVIWAKALPAGTSAQRAELIALTQALKMAEGKKLNVYTDSRYAFATAHIHGEIYRRRGWLTSEGKEIKNKDEILALLKALFLPKRLSIIHCPGHQKGHSAEARGNRMADQAARKAAITETPDTSTLLIENSSPSGGSKRTADGSEFEPKKKRKV

SEQ ID NO: 625 - protein, 2077 aa, synthetic construct
  REGION 1..2077: note = Description of Artificial Sequence: Synthetic polypeptide
DKKYSIGLDIGTNSVGWAVITDEYKVPSKKFKVLGNTDRHSIKKNLIGALLFDSGETAEATRLKRTARRRYTRRKNRICYLQEIFSNEMAKVDDSFFHRLEESFLVEEDKKHERHPIFGNIVDEVAYHEKYPTIYHLRKKLVDSTDKADLRLIYLALAHMIKFRGHFLIEGDLNPDNSDVDKLFIQLVQTYNQLFEENPINASGVDAKAILSARLSKSRRLENLIAQLPGEKKNGLFGNLIALSLGLTPNFKSNFDLAEDAKLQLSKDTYDDDLDNLLAQIGDQYADLFLAAKNLSDAILLSDILRVNTEITKAPLSASMIKRYDEHHQDLTLLKALVRQQLPEKYKEIFFDQSKNGYAGYIDGGASQEEFYKFIKPILEKMDGTEELLVKLNREDLLRKQRTFDNGSIPHQIHLGELHAILRRQEDFYPFLKDNREKIEKILTFRIPYYVGPLARGNSRFAWMTRKSEETITPWNFEEVVDKGASAQSFIERMTNFDKNLPNEKVLPKHSLLYEYFTVYNELTKVKYVTEGMRKPAFLSGEQKKAIVDLLFKTNRKVTVKQLKEDYFKKIECFDSVEISGVEDRFNASLGTYHDLLKIIKDKDFLDNEENEDILEDIVLTLTLFEDREMIEERLKTYAHLFDDKVMKQLKRRRYTGWGRLSRKLINGIRDKQSGKTILDFLKSDGFANRNFMQLIHDDSLTFKEDIQKAQVSGQGDSLHEHIANLAGSPAIKKGILQTVKVVDELVKVMGRHKPENIVIEMARENQTTQKGQKNSRERMKRIEEGIKELGSQILKEHPVENTQLQNEKLYLYYLQNGRDMYVDQELDINRLSDYDVDAIVPQSFLKDDSIDNKVLTRSDKNRGKSDNVPSEEVVKKMKNYWRQLLNAKLITQRKFDNLTKAERGGLSELDKAGFIKRQLVETRQITKHVAQILDSRMNTKYDENDKLIREVKVITLKSKLVSDFRKDFQFYKVREINNYHHAHDAYLNAVVGTALIKKYPKLESEFVYGDYKVYDVRKMIAKSEQEIGKATAKYFFYSNIMNFFKTEITLANGEIRKRPLIETNGETGEIVWDKGRDFATVRKVLSMPQVNIVKKTEVQTGGFSKESILPKRNSDKLIARKKDWDPKKYGGFDSPTVAYSVLVVAKVEKGKSKKLKSVKELLGITIMERSSFEKNPIDFLEAKGYKEVKKDLIIKLPKYSLFELENGRKRMLASAGELQKGNELALPSKYVNFLYLASHYEKLKGSPEDNEQKQLFVEQHKHYLDEIIEQISEFSKRVILADANLDKVLSAYNKHRDKPIREQAENIIHLFTLTNLGAPAAFKYFDTTIDRKRYTSTKEVLDATLIHQSITGLYETRIDLSQLGGDSGGSSGGSSGSETPGTSESATPESSGGSSGGSSTLNIEDEYRLHETSKEPDVSLGSTWLSDFPQAWAETGGMGLAVRQAPLIIPLKATSTPVSIKQYPMSQEARLGIKPHIQRLLDQGILVPCQSPWNTPLLPVKKPGTNDYRPVQDLREVNKRVEDIHPTVPNPYNLLSGLPPSHQWYTVLDLKDAFFCLRLHPTSQPLFAFEWRDPEMGISGQLTWTRLPQGFKNSPTLFNEALHRDLADFRIQHPDLILLQYVDDLLLAATSELDCQQGTRALLQTLGNLGYRASAKKAQICQKQVKYLGYLLKEGQRWLTEARKETVMGQPTPKTPRQLREFLGKAGFCRLFIPGFAEMAAPLYPLTKPGTLFNWGPDQQKAYQEIKQALLTAPALGLPDLTKPFELFVDEKQGYAKGVLTQKLGPWRRPVAYLSKKLDPVAAGWPPCLRMVAAIAVLTKDAGKLTMGQPLVILAPHAVEALVKQPPDRWLSNARMTHYQALLLDTDRVQFGPVVALNPATLLPLPEEGLQHNCLDILAEAHGTRPDLTDQPLPDADHTWYTDGSSLLQEGQRKAGAAVTTETEVIWAKALPAGTSAQRAELIALTQALKMAEGKKLNVYTDSRYAFATAHIHGEIYRRRGWLTSEGKEIKNKDEILALLKALFLPKRLSIIHCPGHQKGHSAEARGNRMADQAARKAAITETPDTSTLLIENSSP

SEQ ID NO: 626 - protein, 731 aa, synthetic construct
  REGION 1..731: note = Description of Artificial Sequence: Synthetic polypeptide
SGGSSGGSSGSETPGTSESATPESSGGSSGGSSTLNIEDEYRLHETSKEPDVSLGSTWLSDFPQAWAETGGMGLAVRQAPLIIPLKATSTPVSIKQYPMSQEARLGIKPHIQRLLDQGILVPCQSPWNTPLLPVKKPGTNDYRPVQDLREVNKRVEDIHPTVPNPYNLLSGLPPSHQWYTVLDLKDAFFCLRLHPTSQPLFAFEWRDPEMGISGQLTWTRLPQGFKNSPTLFNEALHRDLADFRIQHPDLILLQYVDDLLLAATSELDCQQGTRALLQTLGNLGYRASAKKAQICQKQVKYLGYLLKEGQRWLTEARKETVMGQPTPKTPRQLREFLGKAGFCRLFIPGFAEMAAPLYPLTKPGTLFNWGPDQQKAYQEIKQALLTAPALGLPDLTKPFELFVDEKQGYAKGVLTQKLGPWRRPVAYLSKKLDPVAAGWPPCLRMVAAIAVLTKDAGKLTMGQPLVILAPHAVEALVKQPPDRWLSNARMTHYQALLLDTDRVQFGPVVALNPATLLPLPEEGLQHNCLDILAEAHGTRPDLTDQPLPDADHTWYTDGSSLLQEGQRKAGAAVTTETEVIWAKALPAGTSAQRAELIALTQALKMAEGKKLNVYTDSRYAFATAHIHGEIYRRRGWLTSEGKEIKNKDEILALLKALFLPKRLSIIHCPGHQKGHSAEARGNRMADQAARKAAITETPDTSTLLIENSSPSGGSKRTADGSEFEPKKKRKV

SEQ ID NO: 627 - DNA, 4101 bp, synthetic construct
  misc_feature 1..4101: note = Description of Artificial Sequence: Synthetic polypeptide
  source 1..4101: mol_type = other DNA
gacaagaagtacagcatcggcctggacatcggcaccaactctgtgggctgggccgtgatcaccgacgagtacaaggtgcccagcaagaaattcaaggtgctgggcaacaccgaccggcacagcatcaagaagaacctgatcggagccctgctgttcgacagcggcgaaacagccgaggccacccggctgaagagaaccgccagaagaagatacaccagacggaagaaccggatctgctatctgcaagagatcttcagcaacgagatggccaaggtggacgacagcttcttccacagactggaagagtccttcctggtggaagaggataagaagcacgagcggcaccccatcttcggcaacatcgtggacgaggtggcctaccacgagaagtaccccaccatctaccacctgagaaagaaactggtggacagcaccgacaaggccgacctgcggctgatctatctggccctggcccacatgatcaagttccggggccacttcctgatcgagggcgacctgaaccccgacaacagcgacgtggacaagctgttcatccagctggtgcagacctacaaccagctgttcgaggaaaaccccatcaacgccagcggcgtggacgccaaggccatcctgtctgccagactgagcaagagcagacggctggaaaatctgatcgcccagctgcccggcgagaagaagaatggcctgttcggaaacctgattgccctgagcctgggcctgacccccaacttcaagagcaacttcgacctggccgaggatgccaaactgcagctgagcaaggacacctacgacgacgacctggacaacctgctggcccagatcggcgaccagtacgccgacctgtttctggccgccaagaacctgtccgacgccatcctgctgagcgacatcctgagagtgaacaccgagatcaccaaggcccccctgagcgcctctatgatcaagagatacgacgagcaccaccaggacctgaccctgctgaaagctctcgtgcggcagcagctgcctgagaagtacaaagagattttcttcgaccagagcaagaacggctacgccggctacattgacggcggagccagccaggaagagttctacaagttcatcaagcccatcctggaaaagatggacggcaccgaggaactgctcgtgaagctgaacagagaggacctgctgcggaagcagcggaccttcgacaacggcagcatcccccaccagatccacctgggagagctgcacgccattctgcggcggcaggaagatttttacccattcctgaaggacaaccgggaaaagatcgagaagatcctgaccttccgcatcccctactacgtgggccctctggccaggggaaacagcagattcgcctggatgaccagaaagagcgaggaaaccatcaccccctggaacttcgaggaagtggtggacaagggcgcttccgcccagagcttcatcgagcggatgaccaacttcgataagaacctgcccaacgagaaggtgctgcccaagcacagcctgctgtacgagtacttcaccgtgtataacgagctgaccaaagtgaaatacgtgaccgagggaatgagaaagcccgccttcctgagcggcgagcagaaaaaggccatcgtggacctgctgttcaagaccaaccggaaagtgaccgtgaagcagctgaaagaggactacttcaagaaaatcgagtgcttcgactccgtggaaatctccggcgtggaagatcggttcaacgcctccctgggcacataccacgatctgctgaaaattatcaaggacaaggacttcctggacaatgaggaaaacgaggacattctggaagatatcgtgctgaccctgacactgtttgaggacagagagatgatcgaggaacggctgaaaacctatgcccacctgttcgacgacaaagtgatgaagcagctgaagcggcggagatacaccggctggggcaggctgagccggaagctgatcaacggcatccgggacaagcagtccggcaagacaatcctggatttcctgaagtccgacggcttcgccaacagaaacttcatgcagctgatccacgacgacagcctgacctttaaagaggacatccagaaagcccaggtgtccggccagggcgatagcctgcacgagcacattgccaatctggccggcagccccgccattaagaagggcatcctgcagacagtgaaggtggtggacgagctcgtgaaagtgatgggccggcacaagcccgagaacatcgtgatcgaaatggccagagagaaccagaccacccagaagggacagaagaacagccgcgagagaatgaagcggatcgaagagggcatcaaagagctgggcagccagatcctgaaagaacaccccgtggaaaacacccagctgcagaacgagaagctgtacctgtactacctgcagaatgggcgggatatgtacgtggaccaggaactggacatcaaccggctgtccgactacgatgtggacgctatcgtgcctcagagctttctgaaggacgactccatcgacaacaaggtgctgaccagaagcgacaagaaccggggcaagagcgacaacgtgccctccgaagaggtcgtgaagaagatgaagaactactggcggcagctgctgaacgccaagctgattacccagagaaagttcgacaatctgaccaaggccgagagaggcggcctgagcgaactggataaggccggcttcatcaagagacagctggtggaaacccggcagatcacaaagcacgtggcacagatcctggactcccggatgaacactaagtacgacgagaatgacaagctgatccgggaagtgaaagtgatcaccctgaagtccaagctggtgtccgatttccggaaggatttccagttttacaaagtgcgcgagatcaacaactaccaccacgcccacgacgcctacctgaacgccgtcgtgggaaccgccctgatcaaaaagtaccctaagctggaaagcgagttcgtgtacggcgactacaaggtgtacgacgtgcggaagatgatcgccaagagcgagcaggaaatcggcaaggctaccgccaagtacttcttctacagcaacatcatgaactttttcaagaccgagattaccctggccaacggcgagatccggaagcggcctctgatcgagacaaacggcgaaaccggggagatcgtgtgggataagggccgggattttgccaccgtgcggaaagtgctgagcatgccccaagtgaatatcgtgaaaaagaccgaggtgcagacaggcggcttcagcaaagagtctatcctgcccaagaggaacagcgataagctgatcgccagaaagaaggactgggaccctaagaagtacggcggcttcgacagccccaccgtggcctattctgtgctggtggtggccaaagtggaaaagggcaagtccaagaaactgaagagtgtgaaagagctgctggggatcaccatcatggaaagaagcagcttcgagaagaatcccatcgactttctggaagccaagggctacaaagaagtgaaaaaggacctgatcatcaagctgcctaagtactccctgttcgagctggaaaacggccggaagagaatgctggcctctgccggcgaactgcagaagggaaacgaactggccctgccctccaaatatgtgaacttcctgtacctggccagccactatgagaagctgaagggctcccccgaggataatgagcagaaacagctgtttgtggaacagcacaagcactacctggacgagatcatcgagcagatcagcgagttctccaagagagtgatcctggccgacgctaatctggacaaagtgctgtccgcctacaacaagcaccgggataagcccatcagagagcaggccgagaatatcatccacctgtttaccctgaccaatctgggagcccctgccgccttcaagtactttgacaccaccatcgaccggaagaggtacaccagcaccaaagaggtgctggacgccaccctgatccaccagagcatcaccggcctgtacgagacacggatcgacctgtctcagctgggaggtgac

SEQ ID NO: 628 - RNA, 4101 nt, synthetic construct
  misc_feature 1..4101: note = Description of Artificial Sequence: Synthetic polypeptide
  source 1..4101: mol_type = other RNA
gacaagaagtacagcatcggcctggacatcggcaccaactctgtgggctgggccgtgatcaccgacgagtacaaggtgcccagcaagaaattcaaggtgctgggcaacaccgaccggcacagcatcaagaagaacctgatcggagccctgctgttcgacagcggcgaaacagccgaggccacccggctgaagagaaccgccagaagaagatacaccagacggaagaaccggatctgctatctgcaagagatcttcagcaacgagatggccaaggtggacgacagcttcttccacagactggaagagtccttcctggtggaagaggataagaagcacgagcggcaccccatcttcggcaacatcgtggacgaggtggcctaccacgagaagtaccccaccatctaccacctgagaaagaaactggtggacagcaccgacaaggccgacctgcggctgatctatctggccctggcccacatgatcaagttccggggccacttcctgatcgagggcgacctgaaccccgacaacagcgacgtggacaagctgttcatccagctggtgcagacctacaaccagctgttcgaggaaaaccccatcaacgccagcggcgtggacgccaaggccatcctgtctgccagactgagcaagagcagacggctggaaaatctgatcgcccagctgcccggcgagaagaagaatggcctgttcggaaacctgattgccctgagcctgggcctgacccccaacttcaagagcaacttcgacctggccgaggatgccaaactgcagctgagcaaggacacctacgacgacgacctggacaacctgctggcccagatcggcgaccagtacgccgacctgtttctggccgccaagaacctgtccgacgccatcctgctgagcgacatcctgagagtgaacaccgagatcaccaaggcccccctgagcgcctctatgatcaagagatacgacgagcaccaccaggacctgaccctgctgaaagctctcgtgcggcagcagctgcctgagaagtacaaagagattttcttcgaccagagcaagaacggctacgccggctacattgacggcggagccagccaggaagagttctacaagttcatcaagcccatcctggaaaagatggacggcaccgaggaactgctcgtgaagctgaacagagaggacctgctgcggaagcagcggaccttcgacaacggcagcatcccccaccagatccacctgggagagctgcacgccattctgcggcggcaggaagatttttacccattcctgaaggacaaccgggaaaagatcgagaagatcctgaccttccgcatcccctactacgtgggccctctggccaggggaaacagcagattcgcctggatgaccagaaagagcgaggaaaccatcaccccctggaacttcgaggaagtggtggacaagggcgcttccgcccagagcttcatcgagcggatgaccaacttcgataagaacctgcccaacgagaaggtgctgcccaagcacagcctgctgtacgagtacttcaccgtgtataacgagctgaccaaagtgaaatacgtgaccgagggaatgagaaagcccgccttcctgagcggcgagcagaaaaaggccatcgtggacctgctgttcaagaccaaccggaaagtgaccgtgaagcagctgaaagaggactacttcaagaaaatcgagtgcttcgactccgtggaaatctccggcgtggaagatcggttcaacgcctccctgggcacataccacgatctgctgaaaattatcaaggacaaggacttcctggacaatgaggaaaacgaggacattctggaagatatcgtgctgaccctgacactgtttgaggacagagagatgatcgaggaacggctgaaaacctatgcccacctgttcgacgacaaagtgatgaagcagctgaagcggcggagatacaccggctggggcaggctgagccggaagctgatcaacggcatccgggacaagcagtccggcaagacaatcctggatttcctgaagtccgacggcttcgccaacagaaacttcatgcagctgatccacgacgacagcctgacctttaaagaggacatccagaaagcccaggtgtccggccagggcgatagcctgcacgagcacattgccaatctggccggcagccccgccattaagaagggcatcctgcagacagtgaaggtggtggacgagctcgtgaaagtgatgggccggcacaagcccgagaacatcgtgatcgaaatggccagagagaaccagaccacccagaagggacagaagaacagccgcgagagaatgaagcggatcgaagagggcatcaaagagctgggcagccagatcctgaaagaacaccccgtggaaaacacccagctgcagaacgagaagctgtacctgtactacctgcagaatgggcgggatatgtacgtggaccaggaactggacatcaaccggctgtccgactacgatgtggacgctatcgtgcctcagagctttctgaaggacgactccatcgacaacaaggtgctgaccagaagcgacaagaaccggggcaagagcgacaacgtgccctccgaagaggtcgtgaagaagatgaagaactactggcggcagctgctgaacgccaagctgattacccagagaaagttcgacaatctgaccaaggccgagagaggcggcctgagcgaactggataaggccggcttcatcaagagacagctggtggaaacccggcagatcacaaagcacgtggcacagatcctggactcccggatgaacactaagtacgacgagaatgacaagctgatccgggaagtgaaagtgatcaccctgaagtccaagctggtgtccgatttccggaaggatttccagttttacaaagtgcgcgagatcaacaactaccaccacgcccacgacgcctacctgaacgccgtcgtgggaaccgccctgatcaaaaagtaccctaagctggaaagcgagttcgtgtacggcgactacaaggtgtacgacgtgcggaagatgatcgccaagagcgagcaggaaatcggcaaggctaccgccaagtacttcttctacagcaacatcatgaactttttcaagaccgagattaccctggccaacggcgagatccggaagcggcctctgatcgagacaaacggcgaaaccggggagatcgtgtgggataagggccgggattttgccaccgtgcggaaagtgctgagcatgccccaagtgaatatcgtgaaaaagaccgaggtgcagacaggcggcttcagcaaagagtctatcctgcccaagaggaacagcgataagctgatcgccagaaagaaggactgggaccctaagaagtacggcggcttcgacagccccaccgtggcctattctgtgctggtggtggccaaagtggaaaagggcaagtccaagaaactgaagagtgtgaaagagctgctggggatcaccatcatggaaagaagcagcttcgagaagaatcccatcgactttctggaagccaagggctacaaagaagtgaaaaaggacctgatcatcaagctgcctaagtactccctgttcgagctggaaaacggccggaagagaatgctggcctctgccggcgaactgcagaagggaaacgaactggccctgccctccaaatatgtgaacttcctgtacctggccagccactatgagaagctgaagggctcccccgaggataatgagcagaaacagctgtttgtggaacagcacaagcactacctggacgagatcatcgagcagatcagcgagttctccaagagagtgatcctggccgacgctaatctggacaaagtgctgtccgcctacaacaagcaccgggataagcccatcagagagcaggccgagaatatcatccacctgtttaccctgaccaatctgggagcccctgccgccttcaagtactttgacaccaccatcgaccggaagaggtacaccagcaccaaagaggtgctggacgccaccctgatccaccagagcatcaccggcctgtacgagacacggatcgacctgtctcagctgggaggtgac

SEQ ID NO: 629 - DNA, 4101 bp, synthetic construct
  misc_feature 1..4101: note = Description of Artificial Sequence: Synthetic polypeptide
  source 1..4101: mol_type = other DNA
gacaagaagtacagcatcggcctggacatcggcaccaactctgtgggctgggccgtgatcaccgacgagtacaaggtgcccagcaagaaattcaaggtgctgggcaacaccgaccggcacagcatcaagaagaacctgatcggagccctgctgttcgacagcggcgaaacagccgaggccacccggctgaagagaaccgccagaagaagatacaccagacggaagaaccggatctgctatctgcaagagatcttcagcaacgagatggccaaggtggacgacagcttcttccacagactggaagagtccttcctggtggaagaggataagaagcacgagcggcaccccatcttcggcaacatcgtggacgaggtggcctaccacgagaagtaccccaccatctaccacctgagaaagaaactggtggacagcaccgacaaggccgacctgcggctgatctatctggccctggcccacatgatcaagttccggggccacttcctgatcgagggcgacctgaaccccgacaacagcgacgtggacaagctgttcatccagctggtgcagacctacaaccagctgttcgaggaaaaccccatcaacgccagcggcgtggacgccaaggccatcctgtctgccagactgagcaagagcagacggctggaaaatctgatcgcccagctgcccggcgagaagaagaatggcctgttcggaaacctgattgccctgagcctgggcctgacccccaacttcaagagcaacttcgacctggccgaggatgccaaactgcagctgagcaaggacacctacgacgacgacctggacaacctgctggcccagatcggcgaccagtacgccgacctgtttctggccgccaagaacctgtccgacgccatcctgctgagcgacatcctgagagtgaacaccgagatcaccaaggcccccctgagcgcctctatgatcaagagatacgacgagcaccaccaggacctgaccctgctgaaagctctcgtgcggcagcagctgcctgagaagtacaaagagattttcttcgaccagagcaagaacggctacgccggctacattgacggcggagccagccaggaagagttctacaagttcatcaagcccatcctggaaaagatggacggcaccgaggaactgctcgtgaagctgaacagagaggacctgctgcggaagcagcggaccttcgacaacggcagcatcccccaccagatccacctgggagagctgcacgccattctgcggcggcaggaagatttttacccattcctgaaggacaaccgggaaaagatcgagaagatcctgaccttccgcatcccctactacgtgggccctctggccaggggaaacagcagattcgcctggatgaccagaaagagcgaggaaaccatcaccccctggaacttcgaggaagtggtggacaagggcgcttccgcccagagcttcatcgagcggatgaccaacttcgataagaacctgcccaacgagaaggtgctgcccaagcacagcctgctgtacgagtacttcaccgtgtataacgagctgaccaaagtgaaatacgtgaccgagggaatgagaaagcccgccttcctgagcggcgagcagaaaaaggccatcgtggacctgctgttcaagaccaaccggaaagtgaccgtgaagcagctgaaagaggactacttcaagaaaatcgagtgcttcgactccgtggaaatctccggcgtggaagatcggttcaacgcctccctgggcacataccacgatctgctgaaaattatcaaggacaaggacttcctggacaatgaggaaaacgaggacattctggaagatatcgtgctgaccctgacactgtttgaggacagagagatgatcgaggaacggctgaaaacctatgcccacctgttcgacgacaaagtgatgaagcagctgaagcggcggagatacaccggctggggcaggctgagccggaagctgatcaacggcatccgggacaagcagtccggcaagacaatcctggatttcctgaagtccgacggcttcgccaacagaaacttcatgcagctgatccacgacgacagcctgacctttaaagaggacatccagaaagcccaggtgtccggccagggcgatagcctgcacgagcacattgccaatctggccggcagccccgccattaagaagggcatcctgcagacagtgaaggtggtggacgagctcgtgaaagtgatgggccggcacaagcccgagaacatcgtgatcgaaatggccagagagaaccagaccacccagaagggacagaagaacagccgcgagagaatgaagcggatcgaagagggcatcaaagagctgggcagccagatcctgaaagaacaccccgtggaaaacacccagctgcagaacgagaagctgtacctgtactacctgcagaatgggcgggatatgtacgtggaccaggaactggacatcaaccggctgtccgactacgatgtggacgctatcgtgcctcagagctttctgaaggacgactccatcgacaacaaggtgctgaccagaagcgacaagaaccggggcaagagcgacaacgtgccctccgaagaggtcgtgaagaagatgaagaactactggcggcagctgctgaacgccaagctgattacccagagaaagttcgacaatctgaccaaggccgagagaggcggcctgagcgaactggataaggccggcttcatcaagagacagctggtggaaacccggcagatcacaaagcacgtggcacagatcctggactcccggatgaacactaagtacgacgagaatgacaagctgatccgggaagtgaaagtgatcaccctgaagtccaagctggtgtccgatttccggaaggatttccagttttacaaagtgcgcgagatcaacaactaccaccacgcccacgacgcctacctgaacgccgtcgtgggaaccgccctgatcaaaaagtaccctaagctggaaagcgagttcgtgtacggcgactacaaggtgtacgacgtgcggaagatgatcgccaagagcgagcaggaaatcggcaaggctaccgccaagtacttcttctacagcaacatcatgaactttttcaagaccgagattaccctggccaacggcgagatccggaagcggcctctgatcgagacaaacggcgaaaccggggagatcgtgtgggataagggccgggattttgccaccgtgcggaaagtgctgagcatgccccaagtgaatatcgtgaaaaagaccgaggtgcagacaggcggcttcagcaaagagtctatcctgcccaagaggaacagcgataagctgatcgccagaaagaaggactgggaccctaagaagtacggcggcttcgacagccccaccgtggcctattctgtgctggtggtggccaaagtggaaaagggcaagtccaagaaactgaagagtgtgaaagagctgctggggatcaccatcatggaaagaagcagcttcgagaagaatcccatcgactttctggaagccaagggctacaaagaagtgaaaaaggacctgatcatcaagctgcctaagtactccctgttcgagctggaaaacggccggaagagaatgctggcctctgccggcgaactgcagaagggaaacgaactggccctgccctccaaatatgtgaacttcctgtacctggccagccactatgagaagctgaagggctcccccgaggataatgagcagaaacagctgtttgtggaacagcacaagcactacctggacgagatcatcgagcagatcagcgagttctccaagagagtgatcctggccgacgctaatctggacaaagtgctgtccgcctacaacaagcaccgggataagcccatcagagagcaggccgagaatatcatccacctgtttaccctgaccaatctgggagcccctgccgccttcaagtactttgacaccaccatcgaccggaagaggtacactagcaccaaagaggtgctggacgccaccctgatccaccagagcatcaccggcctgtacgagacacggatcgacctgtctcagctgggaggtgac

SEQ ID NO: 630 - RNA, 4101 nt, synthetic construct
  misc_feature 1..4101: note = Description of Artificial Sequence: Synthetic polypeptide
  source 1..4101: mol_type = other RNA
gacaagaagtacagcatcggcctggacatcggcaccaactctgtgggctgggccgtgatcaccgacgagtacaaggtgcccagcaagaaattcaaggtgctgggcaacaccgaccggcacagcatcaagaagaacctgatcggagccctgctgttcgacagcggcgaaacagccgaggccacccggctgaagagaaccgccagaagaagatacaccagacggaagaaccggatctgctatctgcaagagatcttcagcaacgagatggccaaggtggacgacagcttcttccacagactggaagagtccttcctggtggaagaggataagaagcacgagcggcaccccatcttcggcaacatcgtggacgaggtggcctaccacgagaagtaccccaccatctaccacctgagaaagaaactggtggacagcaccgacaaggccgacctgcggctgatctatctggccctggcccacatgatcaagttccggggccacttcctgatcgagggcgacctgaaccccgacaacagcgacgtggacaagctgttcatccagctggtgcagacctacaaccagctgttcgaggaaaaccccatcaacgccagcggcgtggacgccaaggccatcctgtctgccagactgagcaagagcagacggctggaaaatctgatcgcccagctgcccggcgagaagaagaatggcctgttcggaaacctgattgccctgagcctgggcctgacccccaacttcaagagcaacttcgacctggccgaggatgccaaactgcagctgagcaaggacacctacgacgacgacctggacaacctgctggcccagatcggcgaccagtacgccgacctgtttctggccgccaagaacctgtccgacgccatcctgctgagcgacatcctgagagtgaacaccgagatcaccaaggcccccctgagcgcctctatgatcaagagatacgacgagcaccaccaggacctgaccctgctgaaagctctcgtgcggcagcagctgcctgagaagtacaaagagattttcttcgaccagagcaagaacggctacgccggctacattgacggcggagccagccaggaagagttctacaagttcatcaagcccatcctggaaaagatggacggcaccgaggaactgctcgtgaagctgaacagagaggacctgctgcggaagcagcggaccttcgacaacggcagcatcccccaccagatccacctgggagagctgcacgccattctgcggcggcaggaagatttttacccattcctgaaggacaaccgggaaaagatcgagaagatcctgaccttccgcatcccctactacgtgggccctctggccaggggaaacagcagattcgcctggatgaccagaaagagcgaggaaaccatcaccccctggaacttcgaggaagtggtggacaagggcgcttccgcccagagcttcatcgagcggatgaccaacttcgataagaacctgcccaacgagaaggtgctgcccaagcacagcctgctgtacgagtacttcaccgtgtataacgagctgaccaaagtgaaatacgtgaccgagggaatgagaaagcccgccttcctgagcggcgagcagaaaaaggccatcgtggacctgctgttcaagaccaaccggaaagtgaccgtgaagcagctgaaagaggactacttcaagaaaatcgagtgcttcgactccgtggaaatctccggcgtggaagatcggttcaacgcctccctgggcacataccacgatctgctgaaaattatcaaggacaaggacttcctggacaatgaggaaaacgaggacattctggaagatatcgtgctgaccctgacactgtttgaggacagagagatgatcgaggaacggctgaaaacctatgcccacctgttcgacgacaaagtgatgaagcagctgaagcggcggagatacaccggctggggcaggctgagccggaagctgatcaacggcatccgggacaagcagtccggcaagacaatcctggatttcctgaagtccgacggcttcgccaacagaaacttcatgcagctgatccacgacgacagcctgacctttaaagaggacatccagaaagcccaggtgtccggccagggcgatagcctgcacgagcacattgccaatctggccggcagccccgccattaagaagggcatcctgcagacagtgaaggtggtggacgagctcgtgaaagtgatgggccggcacaagcccgagaacatcgtgatcgaaatggccagagagaaccagaccacccagaagggacagaagaacagccgcgagagaatgaagcggatcgaagagggcatcaaagagctgggcagccagatcctgaaagaacaccccgtggaaaacacccagctgcagaacgagaagctgtacctgtactacctgcagaatgggcgggatatgtacgtggaccaggaactggacatcaaccggctgtccgactacgatgtggacgctatcgtgcctcagagctttctgaaggacgactccatcgacaacaaggtgctgaccagaagcgacaagaaccggggcaagagcgacaacgtgccctccgaagaggtcgtgaagaagatgaagaactactggcggcagctgctgaacgccaagctgattacccagagaaagttcgacaatctgaccaaggccgagagaggcggcctgagcgaactggataaggccggcttcatcaagagacagctggtggaaacccggcagatcacaaagcacgtggcacagatcctggactcccggatgaacactaagtacgacgagaatgacaagctgatccgggaagtgaaagtgatcaccctgaagtccaagctggtgtccgatttccggaaggatttccagttttacaaagtgcgcgagatcaacaactaccaccacgcccacgacgcctacctgaacgccgtcgtgggaaccgccctgatcaaaaagtaccctaagctggaaagcgagttcgtgtacggcgactacaaggtgtacgacgtgcggaagatgatcgccaagagcgagcaggaaatcggcaaggctaccgccaagtacttcttctacagcaacatcatgaactttttcaagaccgagattaccctggccaacggcgagatccggaagcggcctctgatcgagacaaacggcgaaaccggggagatcgtgtgggataagggccgggattttgccaccgtgcggaaagtgctgagcatgccccaagtgaatatcgtgaaaaagaccgaggtgcagacaggcggcttcagcaaagagtctatcctgcccaagaggaacagcgataagctgatcgccagaaagaaggactgggaccctaagaagtacggcggcttcgacagccccaccgtggcctattctgtgctggtggtggccaaagtggaaaagggcaagtccaagaaactgaagagtgtgaaagagctgctggggatcaccatcatggaaagaagcagcttcgagaagaatcccatcgactttctggaagccaagggctacaaagaagtgaaaaaggacctgatcatcaagctgcctaagtactccctgttcgagctggaaaacggccggaagagaatgctggcctctgccggcgaactgcagaagggaaacgaactggccctgccctccaaatatgtgaacttcctgtacctggccagccactatgagaagctgaagggctcccccgaggataatgagcagaaacagctgtttgtggaacagcacaagcactacctggacgagatcatcgagcagatcagcgagttctccaagagagtgatcctggccgacgctaatctggacaaagtgctgtccgcctacaacaagcaccgggataagcccatcagagagcaggccgagaatatcatccacctgtttaccctgaccaatctgggagcccctgccgccttcaagtactttgacaccaccatcgaccggaagaggtacactagcaccaaagaggtgctggacgccaccctgatccaccagagcatcaccggcctgtacgagacacggatcgacctgtctcagctgggaggtgac

SEQ ID NO: 631 - DNA, 57 bp, synthetic construct
  misc_feature 1..57: note = Description of Artificial Sequence: Synthetic polypeptide
  source 1..57: mol_type = other DNA
atgaaacggacagccgacggaagcgagttcgagtcaccaaagaagaagcggaaagtc

SEQ ID NO: 632 - RNA, 57 nt, synthetic construct
  misc_feature 1..57: note = Description of Artificial Sequence: Synthetic polypeptide
  source 1..57: mol_type = other RNA
atgaaacggacagccgacggaagcgagttcgagtcaccaaagaagaagcggaaagtc

SEQ ID NO: 633 - DNA, 96 bp, synthetic construct
  misc_feature 1..96: note = Description of Artificial Sequence: Synthetic polypeptide
  source 1..96: mol_type = other DNA
tccggcggctcctccggcggaagcagcggcggcagcagcggcggaagcagcggcggcagcagcggcggaagctctggcggatctagcggcggctct

SEQ ID NO: 634 - RNA, 96 nt, synthetic construct
  misc_feature 1..96: note = Description of Artificial Sequence: Synthetic polypeptide
  source 1..96: mol_type = other RNA
tccggcggctcctccggcggaagcagcggcggcagcagcggcggaagcagcggcggcagcagcggcggaagctctggcggatctagcggcggctct

SEQ ID NO: 635 - DNA, 12 bp, synthetic construct
  misc_feature 1..12: note = Description of Artificial Sequence: Synthetic polypeptide
  source 1..12: mol_type = other DNA
agcggcggctcc

SEQ ID NO: 636 - RNA, 12 nt, synthetic construct
  misc_feature 1..12: note = Description of Artificial Sequence: Synthetic polypeptide
  source 1..12: mol_type = other RNA
agcggcggctcc

SEQ ID NO: 637 - DNA, 51 bp, synthetic construct
  misc_feature 1..51: note = Description of Artificial Sequence: Synthetic polypeptide
  source 1..51: mol_type = other DNA
aaacgcaccgccgacgggagcgagttcgagcccaagaagaagaggaaagtc

SEQ ID NO: 638 - RNA, 51 nt, synthetic construct
  misc_feature 1..51: note = Description of Artificial Sequence: Synthetic polypeptide
  source 1..51: mol_type = other RNA
aaacgcaccgccgacgggagcgagttcgagcccaagaagaagaggaaagtc

SEQ ID NO: 639 - RNA, 17 nt, synthetic construct
  misc_feature 1..17: note = Description of Artificial Sequence: Synthetic polypeptide
  source 1..17: mol_type = other RNA
taatacgactcactata

SEQ ID NO: 640 - RNA, 47 nt, synthetic construct
  misc_feature 1..47: note = Description of Artificial Sequence: Synthetic polypeptide
  source 1..47: mol_type = other RNA
aggaaataagagagaaaagaagagtaagaagaaatataagagccacc

SEQ ID NO: 641-644 - skipped (4 entries)

SEQ ID NO: 645 - RNA, 109 nt, synthetic construct
  misc_feature 1..109: note = Description of Artificial Sequence: Synthetic polypeptide
  source 1..109: mol_type = other RNA
gcggccgcttaattaagctgccttctgcggggcttgccttctggccaagcccttcttctctcccttgcacctgtacctcttggtctttgaataaagcctgagtaggaag

SEQ ID NO: 646-647 - skipped (2 entries)

SEQ ID NO: 648 - protein, 4 aa, synthetic construct
  REGION 1..4: note = Description of Artificial Sequence: Synthetic peptide
GGSS

SEQ ID NO: 649 - protein, 10 aa, synthetic construct
  REGION 1..10: note = Description of Artificial Sequence: Synthetic peptide
EAAAKEAAAK

SEQ ID NO: 650 - protein, 20 aa, synthetic construct
  REGION 1..20: note = Description of Artificial Sequence: Synthetic peptide
EAAAKEAAAKEAAAKEAAAK

SEQ ID NO: 651 - protein, 40 aa, synthetic construct
  REGION 1..40: note = Description of Artificial Sequence: Synthetic polypeptide
EAAAKEAAAKEAAAKEAAAKEAAAKEAAAKEAAAKEAAAK

SEQ ID NO: 652 - protein, 691 aa, synthetic construct
  REGION 1..691: note = Description of Artificial Sequence: Synthetic polypeptide
YRLHETSKEPDVSLGSTWLSDFPQAWAETGGMGLAVRQAPLIIPLKATSTPVSIKQYPMSQEARLGIKPHIQRLLDQGILVPCQSPWNTPLLPVKKPGTNDYRPVQDLREVNKRVEDIHPTVPNPYNLLSGLPPSHQWYTVLDLKDAFFCLRLHPTSQPLFAFEWRDPEMGISGQLTWTRLPQGFKNSPTLFNEALHRDLADFRIQHPDLILLQYVDDLLLAATSELDCQQGTRALLQTLGNLGYRASAKKAQICQKQVKYLGYLLKEGQRWLTEARKETVMGQPTPKTPRQLREFLGKAGFCRLFIPGFAEMAAPLYPLTKPGTLFNWGPDQQKAYQEIKQALLTAPALGLPDLTKPFELFVDEKQGYAKGVLTQKLGPWRRPVAYLSKKLDPVAAGWPPCLRMVAAIAVLTKDAGKLTMGQPLVILAPHAVEALVKQPPDRWLSNARMTHYQALLLDTDRVQFGPVVALNPATLLPLPEEGLQHNCLDILAEAHGTRPDLTDQPLPDADHTWYTDGSSLLQEGQRKAGAAVTTETEVIWAKALPAGTSAQRAELIALTQALKMAEGKKLNVYTDSRYAFATAHIHGEIYRRRGWLTSEGKEIKNKDEILALLKALFLPKRLSIIHCPGHQKGHSAEARGNRMADQAARKAAITETPDTSTLLIENSSPSGGSKRTADGSEFEPKKKRKV

SEQ ID NO: 653 - protein, 350 aa, synthetic construct
  REGION 1..350: note = Description of Artificial Sequence: Synthetic polypeptide
  VARIANT 4..150: note = GGS repeats may be deleted
  VARIANT 155..350: note = GGSS repeats may be deleted
GGSGGSGGSGGSGGSGGSGGSGGSGGSGGSGGSGGSGGSGGSGGSGGSGGSGGSGGSGGSGGSGGSGGSGGSGGSGGSGGSGGSGGSGGSGGSGGSGGSGGSGGSGGSGGSGGSGGSGGSGGSGGSGGSGGSGGSGGSGGSGGSGGSGGSGGSSGGSSGGSSGGSSGGSSGGSSGGSSGGSSGGSSGGSSGGSSGGSSGGSSGGSSGGSSGGSSGGSSGGSSGGSSGGSSGGSSGGSSGGSSGGSSGGSSGGSSGGSSGGSSGGSSGGSSGGSSGGSSGGSSGGSSGGSSGGSSGGSSGGSSGGSSGGSSGGSSGGSSGGSSGGSSGGSSGGSSGGSSGGSSGGSSGGSS

SEQ ID NO: 654 - protein, 27 aa, synthetic construct
  REGION 1..27: note = Description of Artificial Sequence: Synthetic peptide
GGSSEAAAKEAAAKEAAAKEAAAKGGS

SEQ ID NO: 655 - protein, 4 aa, synthetic construct
  REGION 1..4: note = Description of Artificial Sequence: Synthetic peptide
GGGS

SEQ ID NO: 656 - protein, 5 aa, synthetic construct
  REGION 1..5: note = Description of Artificial Sequence: Synthetic peptide
GGGGS

SEQ ID NO: 657 - protein, 5 aa, synthetic construct
  REGION 1..5: note = Description of Artificial Sequence: Synthetic peptide
EAAAK

SEQ ID NO: 658 - protein, 21 aa, synthetic construct
  REGION 1..21: note = Description of Artificial Sequence: Synthetic peptide
  VARIANT 4..21: note = 4 or 6 GGS repeats may be deleted
GGSGGSGGSGGSGGSGGSGGS

SEQ ID NO: 659 - protein, 8 aa, synthetic construct
  REGION 1..8: note = Description of Artificial Sequence: Synthetic peptide
GGSSGGSS

SEQ ID NO: 660 - protein, 12 aa, synthetic construct
  REGION 1..12: note = Description of Artificial Sequence: Synthetic peptide
GGSSGGSSGGSS

SEQ ID NO: 661 - protein, 16 aa, synthetic construct
  REGION 1..16: note = Description of Artificial Sequence: Synthetic peptide
GGSSGGSSGGSSGGSS

SEQ ID NO: 662 - protein, 20 aa, synthetic construct
  REGION 1..20: note = Description of Artificial Sequence: Synthetic peptide
GGSSGGSSGGSSGGSSGGSS

SEQ ID NO: 663 - protein, 24 aa, synthetic construct
  REGION 1..24: note = Description of Artificial Sequence: Synthetic peptide
GGSSGGSSGGSSGGSSGGSSGGSS

SEQ ID NO: 664 - protein, 28 aa, synthetic construct
  REGION 1..28: note = Description of Artificial Sequence: Synthetic peptide
GGSSGGSSGGSSGGSSGGSSGGSSGGSS

SEQ ID NO: 665 - protein, 32 aa, synthetic construct
  REGION 1..32: note = Description of Artificial Sequence: Synthetic polypeptide
GGSSGGSSGGSSGGSSGGSSGGSSGGSSGGSS

SEQ ID NO: 666 - protein, 36 aa, synthetic construct
  REGION 1..36: note = Description of Artificial Sequence: Synthetic polypeptide
GGSSGGSSGGSSGGSSGGSSGGSSGGSSGGSSGGSS

SEQ ID NO: 667 - protein, 40 aa, synthetic construct
  REGION 1..40: note = Description of Artificial Sequence: Synthetic polypeptide
GGSSGGSSGGSSGGSSGGSSGGSSGGSSGGSSGGSSGGSS

SEQ ID NO: 668 - protein, 44 aa, synthetic construct
  REGION 1..44: note = Description of Artificial Sequence: Synthetic polypeptide
GGSSGGSSGGSSGGSSGGSSGGSSGGSSGGSSGGSSGGSSGGSS

SEQ ID NO: 669 - protein, 48 aa, synthetic construct
  REGION 1..48: note = Description of Artificial Sequence: Synthetic polypeptide
GGSSGGSSGGSSGGSSGGSSGGSSGGSSGGSSGGSSGGSSGGSSGGSS

SEQ ID NO: 670 - protein, 52 aa, synthetic construct
  REGION 1..52: note = Description of Artificial Sequence: Synthetic polypeptide
GGSSGGSSGGSSGGSSGGSSGGSSGGSSGGSSGGSSGGSSGGSSGGSSGGSS

SEQ ID NO: 671 - protein, 56 aa, synthetic construct
  REGION 1..56: note = Description of Artificial Sequence: Synthetic polypeptide
GGSSGGSSGGSSGGSSGGSSGGSSGGSSGGSSGGSSGGSSGGSSGGSSGGSSGGSS

SEQ ID NO: 672 - protein, 60 aa, synthetic construct
  REGION 1..60: note = Description of Artificial Sequence: Synthetic polypeptide
GGSSGGSSGGSSGGSSGGSSGGSSGGSSGGSSGGSSGGSSGGSSGGSSGGSSGGSSGGSS

SEQ ID NO: 673 - protein, 64 aa, synthetic construct
  REGION 1..64: note = Description of Artificial Sequence: Synthetic polypeptide
GGSSGGSSGGSSGGSSGGSSGGSSGGSSGGSSGGSSGGSSGGSSGGSSGGSSGGSSGGSSGGSS

SEQ ID NO: 674 - protein, 68 aa, synthetic construct
  REGION 1..68: note = Description of Artificial Sequence: Synthetic polypeptide
GGSSGGSSGGSSGGSSGGSSGGSSGGSSGGSSGGSSGGSSGGSSGGSSGGSSGGSSGGSSGGSSGGSS

SEQ ID NO: 675 - protein, 72 aa, synthetic construct
  REGION 1..72: note = Description of Artificial Sequence: Synthetic polypeptide
GGSSGGSSGGSSGGSSGGSSGGSSGGSSGGSSGGSSGGSSGGSSGGSSGGSSGGSSGGSSGGSSGGSSGGSS

SEQ ID NO: 676 - protein, 76 aa, synthetic construct
  REGION 1..76: note = Description of Artificial Sequence: Synthetic polypeptide
GGSSGGSSGGSSGGSSGGSSGGSSGGSSGGSSGGSSGGSSGGSSGGSSGGSSGGSSGGSSGGSSGGSSGGSSGGSS

SEQ ID NO: 677 - protein, 80 aa, synthetic construct
  REGION 1..80: note = Description of Artificial Sequence: Synthetic polypeptide
GGSSGGSSGGSSGGSSGGSSGGSSGGSSGGSSGGSSGGSSGGSSGGSSGGSSGGSSGGSSGGSSGGSSGGSSGGSSGGSS

SEQ ID NO: 678 - protein, 6 aa, synthetic construct
  REGION 1..6: note = Description of Artificial Sequence: Synthetic peptide
GGSGGS

SEQ ID NO: 679 - protein, 9 aa, synthetic construct
  REGION 1..9: note = Description of Artificial Sequence: Synthetic peptide
GGSGGSGGS

SEQ ID NO: 680 - protein, 12 aa, synthetic construct
  REGION 1..12: note = Description of Artificial Sequence: Synthetic peptide
GGSGGSGGSGGS

SEQ ID NO: 681 - protein, 15 aa, synthetic construct
  REGION 1..15: note = Description of Artificial Sequence: Synthetic peptide
GGSGGSGGSGGSGGS

SEQ ID NO: 682 - protein, 18 aa, synthetic construct
  REGION 1..18: note = Description of Artificial Sequence: Synthetic peptide
GGSGGSGGSGGSGGSGGS

SEQ ID NO: 683 - protein, 21 aa, synthetic construct
  REGION 1..21: note = Description of Artificial Sequence: Synthetic peptide
GGSGGSGGSGGSGGSGGSGGS

SEQ ID NO: 684 - protein, 24 aa, synthetic construct
  REGION 1..24: note = Description of Artificial Sequence: Synthetic peptide
GGSGGSGGSGGSGGSGGSGGSGGS

SEQ ID NO: 685 - protein, 27 aa, synthetic construct
  REGION 1..27: note = Description of Artificial Sequence: Synthetic peptide
GGSGGSGGSGGSGGSGGSGGSGGSGGS

SEQ ID NO: 686 - protein, 30 aa, synthetic construct
  REGION 1..30: note = Description of Artificial Sequence: Synthetic polypeptide
GGSGGSGGSGGSGGSGGSGGSGGSGGSGGS

SEQ ID NO: 687 - protein, 33 aa, synthetic construct
  REGION 1..33: note = Description of Artificial Sequence: Synthetic polypeptide
GGSGGSGGSGGSGGSGGSGGSGGSGGSGGSGGS

SEQ ID NO: 688 - protein, 36 aa, synthetic construct
  REGION 1..36: note = Description of Artificial Sequence: Synthetic polypeptide
GGSGGSGGSGGSGGSGGSGGSGGSGGSGGSGGSGGS

SEQ ID NO: 689 - protein, 39 aa, synthetic construct
  REGION 1..39: note = Description of Artificial Sequence: Synthetic polypeptide
GGSGGSGGSGGSGGSGGSGGSGGSGGSGGSGGSGGSGGS

SEQ ID NO: 690 - protein, 42 aa, synthetic construct
  REGION 1..42: note = Description of Artificial Sequence: Synthetic polypeptide
GGSGGSGGSGGSGGSGGSGGSGGSGGSGGSGGSGGSGGSGGS

SEQ ID NO: 691 - protein, 45 aa, synthetic construct
  REGION 1..45: note = Description of Artificial Sequence: Synthetic polypeptide
GGSGGSGGSGGSGGSGGSGGSGGSGGSGGSGGSGGSGGSGGSGGS

SEQ ID NO: 692 - protein, 48 aa, synthetic construct
  REGION 1..48: note = Description of Artificial Sequence: Synthetic polypeptide
GGSGGSGGSGGSGGSGGSGGSGGSGGSGGSGGSGGSGGSGGSGGSGGS

SEQ ID NO: 693 - protein, 51 aa, synthetic construct
  REGION 1..51: note = Description of Artificial Sequence: Synthetic polypeptide
GGSGGSGGSGGSGGSGGSGGSGGSGGSGGSGGSGGSGGSGGSGGSGGSGGS

SEQ ID NO: 694 - protein, 54 aa, synthetic construct
  REGION 1..54: note = Description of Artificial Sequence: Synthetic polypeptide
GGSGGSGGSGGSGGSGGSGGSGGSGGSGGSGGSGGSGGSGGSGGSGGSGGSGGS

SEQ ID NO: 695 - protein, 57 aa, synthetic construct
  REGION 1..57: note = Description of Artificial Sequence: Synthetic polypeptide
GGSGGSGGSGGSGGSGGSGGSGGSGGSGGSGGSGGSGGSGGSGGSGGSGGSGGSGGS

SEQ ID NO: 696 - protein, 60 aa, synthetic construct
  REGION 1..60: note = Description of Artificial Sequence: Synthetic polypeptide
GGSGGSGGSGGSGGSGGSGGSGGSGGSGGSGGSGGSGGSGGSGGSGGSGGSGGSGGSGGS

SEQ ID NO: 697 - protein, 15 aa, synthetic construct
  REGION 1..15: note = Description of Artificial Sequence: Synthetic peptide
EAAAKEAAAKEAAAK

SEQ ID NO: 698 - protein, 25 aa, synthetic construct
  REGION 1..25: note = Description of Artificial Sequence: Synthetic peptide
EAAAKEAAAKEAAAKEAAAKEAAAK

SEQ ID NO: 699 - protein, 30 aa, synthetic construct
  REGION 1..30: note = Description of Artificial Sequence: Synthetic polypeptide
EAAAKEAAAKEAAAKEAAAKEAAAKEAAAK

SEQ ID NO: 700 - protein, 35 aa, synthetic construct
  REGION 1..35: note = Description of Artificial Sequence: Synthetic polypeptide
EAAAKEAAAKEAAAKEAAAKEAAAKEAAAKEAAAK

SEQ ID NO: 701 - protein, 45 aa, synthetic construct
  REGION 1..45: note = Description of Artificial Sequence: Synthetic polypeptide
EAAAKEAAAKEAAAKEAAAKEAAAKEAAAKEAAAKEAAAKEAAAK

SEQ ID NO: 702 - protein, 50 aa, synthetic construct
  REGION 1..50: note = Description of Artificial Sequence: Synthetic polypeptide
EAAAKEAAAKEAAAKEAAAKEAAAKEAAAKEAAAKEAAAKEAAAKEAAAK

SEQ ID NO: 703 - protein, 55 aa, synthetic construct
  REGION 1..55: note = Description of Artificial Sequence: Synthetic polypeptide
EAAAKEAAAKEAAAKEAAAKEAAAKEAAAKEAAAKEAAAKEAAAKEAAAKEAAAK

SEQ ID NO: 704 - protein, 60 aa, synthetic construct
  REGION 1..60: note = Description of Artificial Sequence: Synthetic polypeptide
EAAAKEAAAKEAAAKEAAAKEAAAKEAAAKEAAAKEAAAKEAAAKEAAAKEAAAKEAAAK

SEQ ID NO: 705 - protein, 65 aa, synthetic construct
  REGION 1..65: note = Description of Artificial Sequence: Synthetic polypeptide
EAAAKEAAAKEAAAKEAAAKEAAAKEAAAKEAAAKEAAAKEAAAKEAAAKEAAAKEAAAKEAAAK

SEQ ID NO: 706 - protein, 70 aa, synthetic construct
  REGION 1..70: note = Description of Artificial Sequence: Synthetic polypeptide
EAAAKEAAAKEAAAKEAAAKEAAAKEAAAKEAAAKEAAAKEAAAKEAAAKEAAAKEAAAKEAAAKEAAAK

SEQ ID NO: 707 - protein, 75 aa, synthetic construct
  REGION 1..75: note = Description of Artificial Sequence: Synthetic polypeptide
EAAAKEAAAKEAAAKEAAAKEAAAKEAAAKEAAAKEAAAKEAAAKEAAAKEAAAKEAAAKEAAAKEAAAKEAAAK

SEQ ID NO: 708 - protein, 80 aa, synthetic construct
  REGION 1..80: note = Description of Artificial Sequence: Synthetic polypeptide
EAAAKEAAAKEAAAKEAAAKEAAAKEAAAKEAAAKEAAAKEAAAKEAAAKEAAAKEAAAKEAAAKEAAAKEAAAKEAAAK

SEQ ID NO: 709 - protein, 85 aa, synthetic construct
  REGION 1..85: note = Description of Artificial Sequence: Synthetic polypeptide
EAAAKEAAAKEAAAKEAAAKEAAAKEAAAKEAAAKEAAAKEAAAKEAAAKEAAAKEAAAKEAAAKEAAAKEAAAKEAAAKEAAAK

SEQ ID NO: 710 - protein, 90 aa, synthetic construct
  REGION 1..90: note = Description of Artificial Sequence: Synthetic polypeptide
EAAAKEAAAKEAAAKEAAAKEAAAKEAAAKEAAAKEAAAKEAAAKEAAAKEAAAKEAAAKEAAAKEAAAKEAAAKEAAAKEAAAKEAAAK

SEQ ID NO: 711 - protein, 95 aa, synthetic construct
  REGION 1..95: note = Description of Artificial Sequence: Synthetic polypeptide
EAAAKEAAAKEAAAKEAAAKEAAAKEAAAKEAAAKEAAAKEAAAKEAAAKEAAAKEAAAKEAAAKEAAAKEAAAKEAAAKEAAAKEAAAKEAAAK

SEQ ID NO: 712 - protein, 100 aa, synthetic construct
  REGION 1..100: note = Description of Artificial Sequence: Synthetic polypeptide
EAAAKEAAAKEAAAKEAAAKEAAAKEAAAKEAAAKEAAAKEAAAKEAAAKEAAAKEAAAKEAAAKEAAAKEAAAKEAAAKEAAAKEAAAKEAAAKEAAAK

SEQ ID NO: 713 - protein, 350 aa, synthetic construct
  REGION 1..350: note = Description of Artificial Sequence: Synthetic polypeptide
  VARIANT 5..200: note = GGSS repeats may be deleted
  VARIANT 204..350: note = GGS repeats may be deleted
GGSSGGSSGGSSGGSSGGSSGGSSGGSSGGSSGGSSGGSSGGSSGGSSGGSSGGSSGGSSGGSSGGSSGGSSGGSSGGSSGGSSGGSSGGSSGGSSGGSSGGSSGGSSGGSSGGSSGGSSGGSSGGSSGGSSGGSSGGSSGGSSGGSSGGSSGGSSGGSSGGSSGGSSGGSSGGSSGGSSGGSSGGSSGGSSGGSSGGSSGGSGGSGGSGGSGGSGGSGGSGGSGGSGGSGGSGGSGGSGGSGGSGGSGGSGGSGGSGGSGGSGGSGGSGGSGGSGGSGGSGGSGGSGGSGGSGGSGGSGGSGGSGGSGGSGGSGGSGGSGGSGGSGGSGGSGGSGGSGGSGGSGGSGGS

SEQ ID NO: 714 - protein, 55 aa, synthetic construct
  REGION 1..55: note = Description of Artificial Sequence: Synthetic polypeptide
GGSSGGSSGGSSGGSSGGSSGGSSGGSSGGSSGGSSGGSSGGSSGGSSGGSSGGS

SEQ ID NO: 715 - protein, 59 aa, synthetic construct
  REGION 1..59: note = Description of Artificial Sequence: Synthetic polypeptide
GGSSGGSSGGSSGGSSGGSSGGSSGGSSGGSSGGSSGGSSGGSSGGSSGGSSGGSSGGS

SEQ ID NO: 716 - protein, 63 aa, synthetic construct
  REGION 1..63: note = Description of Artificial Sequence: Synthetic polypeptide
GGSSGGSSGGSSGGSSGGSSGGSSGGSSGGSSGGSSGGSSGGSSGGSSGGSSGGSSGGSSGGS

SEQ ID NO: 717 - protein, 10 aa, synthetic construct
  REGION 1..10: note = Description of Artificial Sequence: Synthetic peptide
GGSSGGSGGS

SEQ ID NO: 718 - protein, 13 aa, synthetic construct
  REGION 1..13: note = Description of Artificial Sequence: Synthetic peptide
GGSSGGSGGSGGS

SEQ ID NO: 719 - protein, 16 aa, synthetic construct
  REGION 1..16: note = Description of Artificial Sequence: Synthetic peptide
GGSSGGSGGSGGSGGS

SEQ ID NO: 720 - protein, 19 aa, synthetic construct
  REGION 1..19: note = Description of Artificial Sequence: Synthetic peptide
GGSSGGSGGSGGSGGSGGS

SEQ ID NO: 721 - protein, 22 aa, synthetic construct
  REGION 1..22: note = Description of Artificial Sequence: Synthetic peptide
GGSSGGSGGSGGSGGSGGSGGS

SEQ ID NO: 722 - protein, 25 aa, synthetic construct
  REGION 1..25: note = Description of Artificial Sequence: Synthetic peptide
GGSSGGSGGSGGSGGSGGSGGSGGS

SEQ ID NO: 723 - protein, 28 aa, synthetic construct
  REGION 1..28: note = Description of Artificial Sequence: Synthetic peptide
GGSSGGSGGSGGSGGSGGSGGSGGSGGS

SEQ ID NO: 724 - protein, 31 aa, synthetic construct
  REGION 1..31: note = Description of Artificial Sequence: Synthetic polypeptide
GGSSGGSGGSGGSGGSGGSGGSGGSGGSGGS

SEQ ID NO: 725 - protein, 34 aa, synthetic construct
  REGION 1..34: note = Description of Artificial Sequence: Synthetic polypeptide
GGSSGGSGGSGGSGGSGGSGGSGGSGGSGGSGGS

SEQ ID NO: 726 - protein, 37 aa, synthetic construct
  REGION 1..37: note = Description of Artificial Sequence: Synthetic polypeptide
GGSSGGSGGSGGSGGSGGSGGSGGSGGSGGSGGSGGS

SEQ ID NO: 727 - protein, 40 aa, synthetic construct
  REGION 1..40: note = Description of Artificial Sequence: Synthetic polypeptide
GGSSGGSGGSGGSGGSGGSGGSGGSGGSGGSGGSGGSGGS

SEQ ID NO: 728 - protein, 43 aa, synthetic construct
  REGION 1..43: note = Description of Artificial Sequence: Synthetic polypeptide
GGSSGGSGGSGGSGGSGGSGGSGGSGGSGGSGGSGGSGGSGGS

SEQ ID NO: 729 - protein, 46 aa, synthetic construct
  REGION 1..46: note = Description of Artificial Sequence: Synthetic polypeptide
GGSSGGSGGSGGSGGSGGSGGSGGSGGSGGSGGSGGSGGSGGSGGS

SEQ ID NO: 730 - protein, 49 aa, synthetic construct
  REGION 1..49: note = Description of Artificial Sequence: Synthetic polypeptide
GGSSGGSGGSGGSGGSGGSGGSGGSGGSGGSGGSGGSGGSGGSGGSGGS

SEQ ID NO: 731 - protein, 14 aa, synthetic construct
  REGION 1..14: note = Description of Artificial Sequence: Synthetic peptide
GGSSGGSSGGSGGS

SEQ ID NO: 732 - protein, 21 aa, synthetic construct
  REGION 1..21: note = Description of Artificial Sequence: Synthetic peptide
GGSSGGSSGGSSGGSGGSGGS

SEQ ID NO: 733 - protein, 28 aa, synthetic construct
  REGION 1..28: note = Description of Artificial Sequence: Synthetic peptide
GGSSGGSSGGSSGGSSGGSGGSGGSGGS

SEQ ID NO: 734 - protein, 35 aa, synthetic construct
  REGION 1..35: note = Description of Artificial Sequence: Synthetic polypeptide
GGSSGGSSGGSSGGSSGGSSGGSGGSGGSGGSGGS

SEQ ID NO: 735 - protein, 42 aa, synthetic construct
  REGION 1..42: note = Description of Artificial Sequence: Synthetic polypeptide
GGSSGGSSGGSSGGSSGGSSGGSSGGSGGSGGSGGSGGSGGS

SEQ ID NO: 736 - protein, 49 aa, synthetic construct
  REGION 1..49: note = Description of Artificial Sequence: Synthetic polypeptide
GGSSGGSSGGSSGGSSGGSSGGSSGGSSGGSGGSGGSGGSGGSGGSGGS

SEQ ID NO: 737 - protein, 56 aa, synthetic construct
  REGION 1..56: note = Description of Artificial Sequence: Synthetic polypeptide
GGSSGGSSGGSSGGSSGGSSGGSSGGSSGGSSGGSGGSGGSGGSGGSGGSGGSGGS

SEQ ID NO: 738 - protein, 63 aa, synthetic construct
  REGION 1..63: note = Description of Artificial Sequence: Synthetic polypeptide
GGSSGGSSGGSSGGSSGGSSGGSSGGSSGGSSGGSSGGSGGSGGSGGSGGSGGSGGSGGSGGS

SEQ ID NO: 739 - protein, 70 aa, synthetic construct
  REGION 1..70: note = Description of Artificial Sequence: Synthetic polypeptide
GGSSGGSSGGSSGGSSGGSSGGSSGGSSGGSSGGSSGGSSGGSGGSGGSGGSGGSGGSGGSGGSGGSGGS

SEQ ID NO: 740 - protein, 77 aa, synthetic construct
  REGION 1..77: note = Description of Artificial Sequence: Synthetic polypeptide
GGSSGGSSGGSSGGSSGGSSGGSSGGSSGGSSGGSSGGSSGGSSGGSGGSGGSGGSGGSGGSGGSGGSGGSGGSGGS

SEQ ID NO: 741 - protein, 84 aa, synthetic construct
  REGION 1..84: note = Description of Artificial Sequence: Synthetic polypeptide
GGSSGGSSGGSSGGSSGGSSGGSSGGSSGGSSGGSSGGSSGGSSGGSSGGSGGSGGSGGSGGSGGSGGSGGSGGSGGSGGSGGS

SEQ ID NO: 742 - protein, 91 aa, synthetic construct
  REGION 1..91: note = Description of Artificial Sequence: Synthetic polypeptide
GGSSGGSSGGSSGGSSGGSSGGSSGGSSGGSSGGSSGGSSGGSSGGSSGGSSGGSGGSGGSGGSGGSGGSGGSGGSGGSGGSGGSGGSGGS

SEQ ID NO: 743 - protein, 98 aa, synthetic construct
  REGION 1..98: note = Description of Artificial Sequence: Synthetic polypeptide
GGSSGGSSGGSSGGSSGGSSGGSSGGSSGGSSGGSSGGSSGGSSGGSSGGSSGGSSGGSGGSGGSGGSGGSGGSGGSGGSGGSGGSGGSGGSGGSGGS

SEQ ID NO: 744 - protein, 105 aa, synthetic construct
  REGION 1..105: note = Description of Artificial Sequence: Synthetic polypeptide
GGSSGGSSGGSSGGSSGGSSGGSSGGSSGGSSGGSSGGSSGGSSGGSSGGSSGGSSGGSSGGSGGSGGSGGSGGSGGSGGSGGSGGSGGSGGSGGSGGSGGSGGS

SEQ ID NO: 745 - protein, 200 aa, synthetic construct
  REGION 1..200: note = Description of Artificial Sequence: Synthetic polypeptide
GGSSGGSSGGSSGGSSGGSSGGSSGGSSGGSSGGSSGGSSGGSSGGSSGGSSGGSSGGSSGGSSGGSSGGSSGGSSGGSSGGSSGGSSGGSSGGSSGGSSGGSSGGSSGGSSGGSSGGSSGGSSGGSSGGSSGGSSGGSSGGSSGGSSGGSSGGSSGGSSGGSSGGSSGGSSGGSSGGSSGGSSGGSSGGSSGGSSGGSS

SEQ ID NO: 746 - protein, 250 aa, synthetic construct
  REGION 1..250: note = Description of Artificial Sequence: Synthetic polypeptide
EAAAKEAAAKEAAAKEAAAKEAAAKEAAAKEAAAKEAAAKEAAAKEAAAKEAAAKEAAAKEAAAKEAAAKEAAAKEAAAKEAAAKEAAAKEAAAKEAAAKEAAAKEAAAKEAAAKEAAAKEAAAKEAAAKEAAAKEAAAKEAAAKEAAAKEAAAKEAAAKEAAAKEAAAKEAAAKEAAAKEAAAKEAAAKEAAAKEAAAKEAAAKEAAAKEAAAKEAAAKEAAAKEAAAKEAAAKEAAAKEAAAKEAAAK

SEQ ID NO: 747 - protein, 600 aa, synthetic construct
  REGION 1..600: note = Description of Artificial Sequence: Synthetic polypeptide
  VARIANT 1..200: note = GGSS repeats may be deleted
  VARIANT 201..450: note = EAAAK repeats may be deleted
  VARIANT 451..600: note = GGS repeats may be deleted
GGSSGGSSGGSSGGSSGGSSGGSSGGSSGGSSGGSSGGSSGGSSGGSSGGSSGGSSGGSSGGSSGGSSGGSSGGSSGGSSGGSSGGSSGGSSGGSSGGSSGGSSGGSSGGSSGGSSGGSSGGSSGGSSGGSSGGSSGGSSGGSSGGSSGGSSGGSSGGSSGGSSGGSSGGSSGGSSGGSSGGSSGGSSGGSSGGSSGGSSEAAAKEAAAKEAAAKEAAAKEAAAKEAAAKEAAAKEAAAKEAAAKEAAAKEAAAKEAAAKEAAAKEAAAKEAAAKEAAAKEAAAKEAAAKEAAAKEAAAKEAAAKEAAAKEAAAKEAAAKEAAAKEAAAKEAAAKEAAAKEAAAKEAAAKEAAAKEAAAKEAAAKEAAAKEAAAKEAAAKEAAAKEAAAKEAAAKEAAAKEAAAKEAAAKEAAAKEAAAKEAAAKEAAAKEAAAKEAAAKEAAAKEAAAKGGSGGSGGSGGSGGSGGSGGSGGSGGSGGSGGSGGSGGSGGSGGSGGSGGSGGSGGSGGSGGSGGSGGSGGSGGSGGSGGSGGSGGSGGSGGSGGSGGSGGSGGSGGSGGSGGSGGSGGSGGSGGSGGSGGSGGSGGSGGSGGSGGSGGS

SEQ ID NO: 748 - protein, 61 aa, synthetic construct
  REGION 1..61: note = Description of Artificial Sequence: Synthetic polypeptide
GGSEAAAKEAAAKEAAAKEAAAKEAAAKEAAAKEAAAKEAAAKEAAAKEAAAKEAAAKGGS

SEQ ID NO: 749 - protein, 66 aa, synthetic construct
  REGION 1..66: note = Description of Artificial Sequence: Synthetic polypeptide
GGSEAAAKEAAAKEAAAKEAAAKEAAAKEAAAKEAAAKEAAAKEAAAKEAAAKEAAAKEAAAKGGS

SEQ ID NO: 750 - protein, 71 aa, synthetic construct
  REGION 1..71: note = Description of Artificial Sequence: Synthetic polypeptide
GGSEAAAKEAAAKEAAAKEAAAKEAAAKEAAAKEAAAKEAAAKEAAAKEAAAKEAAAKEAAAKEAAAKGGS

SEQ ID NO: 751 - protein, 76 aa, synthetic construct
  REGION 1..76: note = Description of Artificial Sequence: Synthetic polypeptide
GGSEAAAKEAAAKEAAAKEAAAKEAAAKEAAAKEAAAKEAAAKEAAAKEAAAKEAAAKEAAAKEAAAKEAAAKGGS

SEQ ID NO: 752 - protein, 81 aa, synthetic construct
  REGION 1..81: note = Description of Artificial Sequence: Synthetic polypeptide
GGSEAAAKEAAAKEAAAKEAAAKEAAAKEAAAKEAAAKEAAAKEAAAKEAAAKEAAAKEAAAKEAAAKEAAAKEAAAKGGS

SEQ ID NO: 753 - protein, 17 aa, synthetic construct
  REGION 1..17: note = Description of Artificial Sequence: Synthetic peptide
GGSGGSEAAAKGGSGGS

SEQ ID NO: 754 - protein, 22 aa, synthetic construct
  REGION 1..22: note = Description of Artificial Sequence: Synthetic peptide
GGSGGSEAAAKEAAAKGGSGGS

SEQ ID NO: 755 - protein, 27 aa, synthetic construct
  REGION 1..27: note = Description of Artificial Sequence: Synthetic peptide
GGSGGSEAAAKEAAAKEAAAKGGSGGS

SEQ ID NO: 756 - protein, 32 aa, synthetic construct
  REGION 1..32: note = Description of Artificial Sequence: Synthetic polypeptide
GGSGGSEAAAKEAAAKEAAAKEAAAKGGSGGS

SEQ ID NO: 757 - protein, 37 aa, synthetic construct
  REGION 1..37: note = Description of Artificial Sequence: Synthetic polypeptide
GGSGGSEAAAKEAAAKEAAAKEAAAKEAAAKGGSGGS

SEQ ID NO: 758 - protein, 42 aa, synthetic construct
  REGION 1..42: note = Description of Artificial Sequence: Synthetic polypeptide
GGSGGSEAAAKEAAAKEAAAKEAAAKEAAAKEAAAKGGSGGS

SEQ ID NO: 759 - protein, 47 aa, synthetic construct
  REGION 1..47: note = Description of Artificial Sequence: Synthetic polypeptide
GGSGGSEAAAKEAAAKEAAAKEAAAKEAAAKEAAAKEAAAKGGSGGS

SEQ ID NO: 760 - protein, 52 aa, synthetic construct
  REGION 1..52: note = Description of Artificial Sequence: Synthetic polypeptide
GGSGGSEAAAKEAAAKEAAAKEAAAKEAAAKEAAAKEAAAKEAAAKGGSGGS

SEQ ID NO: 761 - protein, 57 aa, synthetic construct
  REGION 1..57: note = Description of Artificial Sequence: Synthetic polypeptide
GGSGGSEAAAKEAAAKEAAAKEAAAKEAAAKEAAAKEAAAKEAAAKEAAAKGGSGGS

SEQ ID NO: 762 - protein, 62 aa, synthetic construct
  REGION 1..62: note = Description of Artificial Sequence: Synthetic polypeptide
GGSGGSEAAAKEAAAKEAAAKEAAAKEAAAKEAAAKEAAAKEAAAKEAAAKEAAAKGGSGGS

SEQ ID NO: 763 - protein, 67 aa, synthetic construct
  REGION 1..67: note = Description of Artificial Sequence: Synthetic polypeptide
GGSGGSEAAAKEAAAKEAAAKEAAAKEAAAKEAAAKEAAAKEAAAKEAAAKEAAAKEAAAKGGSGGS

SEQ ID NO: 764 - protein, 72 aa, synthetic construct
  REGION 1..72: note = Description of Artificial Sequence: Synthetic polypeptide
GGSGGSEAAAKEAAAKEAAAKEAAAKEAAAKEAAAKEAAAKEAAAKEAAAKEAAAKEAAAKEAAAKGGSGGS

SEQ ID NO: 765 - protein, 77 aa, synthetic construct
  REGION 1..77: note = Description of Artificial Sequence: Synthetic polypeptide
GGSGGSEAAAKEAAAKEAAAKEAAAKEAAAKEAAAKEAAAKEAAAKEAAAKEAAAKEAAAKEAAAKEAAAKGGSGGS

SEQ ID NO: 766 - protein, 82 aa, synthetic construct
  REGION 1..82: note = Description of Artificial Sequence: Synthetic polypeptide
GGSGGSEAAAKEAAAKEAAAKEAAAKEAAAKEAAAKEAAAKEAAAKEAAAKEAAAKEAAAKEAAAKEAAAKEAAAKGGSGGS

SEQ ID NO: 767 - protein, 87 aa, synthetic construct
  REGION 1..87: note = Description of Artificial Sequence: Synthetic polypeptide
GGSGGSEAAAKEAAAKEAAAKEAAAKEAAAKEAAAKEAAAKEAAAKEAAAKEAAAKEAAAKEAAAKEAAAKEAAAKEAAAKGGSGGS

SEQ ID NO: 768 - protein, 200 aa, synthetic construct
  REGION 1..200: note = Description of Artificial Sequence: Synthetic polypeptide
  VARIANT 5..200: note = PAPA repeats may be deleted
PAPAPAPAPAPAPAPAPAPAPAPAPAPAPAPAPAPAPAPAPAPAPAPAPAPAPAPAPAPAPAPAPAPAPAPAPAPAPAPAPAPAPAPAPAPAPAPAPAPAPAPAPAPAPAPAPAPAPAPAPAPAPAPAPAPAPAPAPAPAPAPAPAPAPAPAPAPAPAPAPAPAPAPAPAPAPAPAPAPAPAPAPAPAPAPAPAPAPAPA

SEQ ID NO: 769 - protein, 8 aa, synthetic construct
  REGION 1..8: note = Description of Artificial Sequence: Synthetic peptide
PAPAPAPA

SEQ ID NO: 770 - protein, 12 aa, synthetic construct
  REGION 1..12: note = Description of Artificial Sequence: Synthetic peptide
PAPAPAPAPAPA

SEQ ID NO: 771 - protein, 16 aa, synthetic construct
  REGION 1..16: note = Description of Artificial Sequence: Synthetic peptide
PAPAPAPAPAPAPAPA

SEQ ID NO: 772 - protein, 20 aa, synthetic construct
  REGION 1..20: note = Description of Artificial Sequence: Synthetic peptide
PAPAPAPAPAPAPAPAPAPA

SEQ ID NO: 773 - protein, 24 aa, synthetic construct
  REGION 1..24: note = Description of Artificial Sequence: Synthetic peptide
PAPAPAPAPAPAPAPAPAPAPAPA

SEQ ID NO: 774 - protein, 28 aa, synthetic construct
  REGION 1..28: note = Description of Artificial Sequence: Synthetic peptide
PAPAPAPAPAPAPAPAPAPAPAPAPAPA

SEQ ID NO: 775 - protein, 32 aa, synthetic construct
  REGION 1..32: note = Description of Artificial Sequence: Synthetic polypeptide
PAPAPAPAPAPAPAPAPAPAPAPAPAPAPAPA

SEQ ID NO: 776 - protein, 36 aa, synthetic construct
  REGION 1..36: note = Description of Artificial Sequence: Synthetic polypeptide
PAPAPAPAPAPAPAPAPAPAPAPAPAPAPAPAPAPA

SEQ ID NO: 777 - protein, 40 aa, synthetic construct
  REGION 1..40: note = Description of Artificial Sequence: Synthetic polypeptide
PAPAPAPAPAPAPAPAPAPAPAPAPAPAPAPAPAPAPAPA

SEQ ID NO: 778 - protein, 44 aa, synthetic construct
  REGION 1..44: note = Description of Artificial Sequence: Synthetic polypeptide
PAPAPAPAPAPAPAPAPAPAPAPAPAPAPAPAPAPAPAPAPAPA

SEQ ID NO: 779 - protein, 48 aa, synthetic construct
  REGION 1..48: note = Description of Artificial Sequence: Synthetic polypeptide
PAPAPAPAPAPAPAPAPAPAPAPAPAPAPAPAPAPAPAPAPAPAPAPA

SEQ ID NO: 780 - protein, 52 aa, synthetic construct
  REGION 1..52: note = Description of Artificial Sequence: Synthetic polypeptide
PAPAPAPAPAPAPAPAPAPAPAPAPAPAPAPAPAPAPAPAPAPAPAPAPAPA

SEQ ID NO: 781 - protein, 56 aa, synthetic construct
  REGION 1..56: note = Description of Artificial Sequence: Synthetic polypeptide
PAPAPAPAPAPAPAPAPAPAPAPAPAPAPAPAPAPAPAPAPAPAPAPAPAPAPAPA

SEQ ID NO: 782 - protein, 60 aa, synthetic construct
  REGION 1..60: note = Description of Artificial Sequence: Synthetic polypeptide
PAPAPAPAPAPAPAPAPAPAPAPAPAPAPAPAPAPAPAPAPAPAPAPAPAPAPAPAPAPA

SEQ ID NO: 783 - protein, 64 aa, synthetic construct
  REGION 1..64: note = Description of Artificial Sequence: Synthetic polypeptide
PAPAPAPAPAPAPAPAPAPAPAPAPAPAPAPAPAPAPAPAPAPAPAPAPAPAPAPAPAPAPAPA

SEQ ID NO: 784 - protein, 68 aa, synthetic construct
  REGION 1..68: note = Description of Artificial Sequence: Synthetic polypeptide
PAPAPAPAPAPAPAPAPAPAPAPAPAPAPAPAPAPAPAPAPAPAPAPAPAPAPAPAPAPAPAPAPAPA

SEQ ID NO: 785 - protein, 72 aa, synthetic construct
  REGION 1..72: note = Description of Artificial Sequence: Synthetic polypeptide
PAPAPAPAPAPAPAPAPAPAPAPAPAPAPAPAPAPAPAPAPAPAPAPAPAPAPAPAPAPAPAPAPAPAPAPA

SEQ ID NO: 786 - protein, 76 aa, synthetic construct
  REGION 1..76: note = Description of Artificial Sequence: Synthetic polypeptide
PAPAPAPAPAPAPAPAPAPAPAPAPAPAPAPAPAPAPAPAPAPAPAPAPAPAPAPAPAPAPAPAPAPAPAPAPAPA

SEQ ID NO: 787 - protein, 80 aa, synthetic construct
  REGION 1..80: note = Description of Artificial Sequence: Synthetic polypeptide
PAPAPAPAPAPAPAPAPAPAPAPAPAPAPAPAPAPAPAPAPAPAPAPAPAPAPAPAPAPAPAPAPAPAPAPAPAPAPAPA

SEQ ID NO: 788 - protein, 500 aa, synthetic construct
  REGION 1..500: note = Description of Artificial Sequence: Synthetic polypeptide
  VARIANT 1..150: note = GGS repeats may be deleted
  VARIANT 151..350: note = PAPA repeats may be deleted
  VARIANT 351..500: note = GGS repeats may be deleted
GGSGGSGGSGGSGGSGGSGGSGGSGGSGGSGGSGGSGGSGGSGGSGGSGGSGGSGGSGGSGGSGGSGGSGGSGGSGGSGGSGGSGGSGGSGGSGGSGGSGGSGGSGGSGGSGGSGGSGGSGGSGGSGGSGGSGGSGGSGGSGGSGGSGGSPAPAPAPAPAPAPAPAPAPAPAPAPAPAPAPAPAPAPAPAPAPAPAPAPAPAPAPAPAPAPAPAPAPAPAPAPAPAPAPAPAPAPAPAPAPAPAPAPAPAPAPAPAPAPAPAPAPAPAPAPAPAPAPAPAPAPAPAPAPAPAPAPAPAPAPAPAPAPAPAPAPAPAPAPAPAPAPAPAPAPAPAPAPAPAPAPAPAPAPAGGSGGSGGSGGSGGSGGSGGSGGSGGSGGSGGSGGSGGSGGSGGSGGSGGSGGSGGSGGSGGSGGSGGSGGSGGSGGSGGSGGSGGSGGSGGSGGSGGSGGSGGSGGSGGSGGSGGSGGSGGSGGSGGSGGSGGSGGSGGSGGSGGSGGS

SEQ ID NO: 789 - protein, 10 aa, synthetic construct
  REGION 1..10: note = Description of Artificial Sequence: Synthetic peptide
GGSPAPAGGS

SEQ ID NO: 790 - protein, 14 aa, synthetic construct
  REGION 1..14: note = Description of Artificial Sequence: Synthetic peptide
GGSPAPAPAPAGGS

SEQ ID NO: 791 - protein, 18 aa, synthetic construct
  REGION 1..18: note = Description of Artificial Sequence: Synthetic peptide
GGSPAPAPAPAPAPAGGS

SEQ ID NO: 792 - protein, 22 aa, synthetic construct
  REGION 1..22: note = Description of Artificial Sequence: Synthetic peptide
GGSPAPAPAPAPAPAPAPAGGS

SEQ ID NO: 793 - protein, 26 aa, synthetic construct
  REGION 1..26: note = Description of Artificial Sequence: Synthetic peptide
GGSPAPAPAPAPAPAPAPAPAPAGGS

SEQ ID NO: 794 - protein, 30 aa, synthetic construct
  REGION 1..30: note = Description of Artificial Sequence: Synthetic polypeptide
GGSPAPAPAPAPAPAPAPAPAPAPAPAGGS

SEQ ID NO: 795 - protein, 34 aa, synthetic construct
  REGION 1..34: note = Description of Artificial Sequence: Synthetic polypeptide
GGSPAPAPAPAPAPAPAPAPAPAPAPAPAPAGGS

SEQ ID NO: 796 - protein, 38 aa, synthetic construct
  REGION 1..38: note = Description of Artificial Sequence: Synthetic polypeptide
GGSPAPAPAPAPAPAPAPAPAPAPAPAPAPAPAPAGGS

SEQ ID NO: 797 - protein, 42 aa, synthetic construct
  REGION 1..42: note = Description of Artificial Sequence: Synthetic polypeptide
GGSPAPAPAPAPAPAPAPAPAPAPAPAPAPAPAPAPAPAGGS

SEQ ID NO: 798 - protein, 46 aa, synthetic construct
  REGION 1..46: note = Description of Artificial Sequence: Synthetic polypeptide
GGSPAPAPAPAPAPAPAPAPAPAPAPAPAPAPAPAPAPAPAPAGGS

SEQ ID NO: 799 - protein, 50 aa, synthetic construct
  REGION 1..50: note = Description of Artificial Sequence: Synthetic polypeptide
GGSPAPAPAPAPAPAPAPAPAPAPAPAPAPAPAPAPAPAPAPAPAPAGGS

SEQ ID NO: 800 - protein, 54 aa, synthetic construct
  REGION 1..54: note = Description of Artificial Sequence: Synthetic polypeptide
GGSPAPAPAPAPAPAPAPAPAPAPAPAPAPAPAPAPAPAPAPAPAPAPAPAGGS

SEQ ID NO: 801 - protein, 58 aa, synthetic construct
  REGION 1..58: note = Description of Artificial Sequence: Synthetic polypeptide
GGSPAPAPAPAPAPAPAPAPAPAPAPAPAPAPAPAPAPAPAPAPAPAPAPAPAPAGGS

SEQ ID NO: 802 - protein, 62 aa, synthetic construct
  REGION 1..62: note = Description of Artificial Sequence: Synthetic polypeptide
GGSPAPAPAPAPAPAPAPAPAPAPAPAPAPAPAPAPAPAPAPAPAPAPAPAPAPAPAPAGGS

SEQ ID NO: 803 - protein, 66 aa, synthetic construct
  REGION 1..66: note = Description of Artificial Sequence: Synthetic polypeptide
GGSPAPAPAPAPAPAPAPAPAPAPAPAPAPAPAPAPAPAPAPAPAPAPAPAPAPAPAPAPAPAGGS

SEQ ID NO: 804 - protein, 16 aa, synthetic construct
  REGION 1..16: note = Description of Artificial Sequence: Synthetic peptide
GGSGGSPAPAGGSGGS

SEQ ID NO: 805 - protein, 20 aa, synthetic construct
  REGION 1..20: note = Description of Artificial Sequence: Synthetic peptide
GGSGGSPAPAPAPAGGSGGS

SEQ ID NO: 806 - protein, 24 aa, synthetic construct
  REGION 1..24: note = Description of Artificial Sequence: Synthetic peptide
GGSGGSPAPAPAPAPAPAGGSGGS

SEQ ID NO: 807 - protein, 28 aa, synthetic construct
  REGION 1..28: note = Description of Artificial Sequence: Synthetic peptide
GGSGGSPAPAPAPAPAPAPAPAGGSGGS

SEQ ID NO: 808 - protein, 32 aa, synthetic construct
  REGION 1..32: note = Description of Artificial Sequence: Synthetic polypeptide
GGSGGSPAPAPAPAPAPAPAPAPAPAGGSGGS

SEQ ID NO: 809 - protein, 36 aa, synthetic construct
  REGION 1..36: note = Description of Artificial Sequence: Synthetic polypeptide
GGSGGSPAPAPAPAPAPAPAPAPAPAPAPAGGSGGS

SEQ ID NO: 810 - protein, 40 aa, synthetic construct
  REGION 1..40: note = Description of Artificial Sequence: Synthetic polypeptide
GGSGGSPAPAPAPAPAPAPAPAPAPAPAPAPAPAGGSGGS

SEQ ID NO: 811 - protein, 44 aa, synthetic construct
  REGION 1..44: note = Description of Artificial Sequence: Synthetic polypeptide
GGSGGSPAPAPAPAPAPAPAPAPAPAPAPAPAPAPAPAGGSGGS

SEQ ID NO: 812 - protein, 48 aa, synthetic construct
  REGION 1..48: note = Description of Artificial Sequence: Synthetic polypeptide
GGSGGSPAPAPAPAPAPAPAPAPAPAPAPAPAPAPAPAPAPAGGSGGS

SEQ ID NO: 813 - protein, 52 aa, synthetic construct
  REGION 1..52: note = Description of Artificial Sequence: Synthetic polypeptide
GGSGGSPAPAPAPAPAPAPAPAPAPAPAPAPAPAPAPAPAPAPAPAGGSGGS

SEQ ID NO: 814 - protein, 56 aa, synthetic construct
  REGION 1..56: note = Description of Artificial Sequence: Synthetic polypeptide
GGSGGSPAPAPAPAPAPAPAPAPAPAPAPAPAPAPAPAPAPAPAPAPAPAGGSGGS

SEQ ID NO: 815 - protein, 60 aa, synthetic construct
  REGION 1..60: note = Description of Artificial Sequence: Synthetic polypeptide
GGSGGSPAPAPAPAPAPAPAPAPAPAPAPAPAPAPAPAPAPAPAPAPAPAPAPAGGSGGS

SEQ ID NO: 816 - protein, 64 aa, synthetic construct
  REGION 1..64: note = Description of Artificial Sequence: Synthetic polypeptide
GGSGGSPAPAPAPAPAPAPAPAPAPAPAPAPAPAPAPAPAPAPAPAPAPAPAPAPAPAGGSGGS

SEQ ID NO: 817 - protein, 68 aa, synthetic construct
  REGION 1..68: note = Description of Artificial Sequence: Synthetic polypeptide
GGSGGSPAPAPAPAPAPAPAPAPAPAPAPAPAPAPAPAPAPAPAPAPAPAPAPAPAPAPAPAGGSGGS

SEQ ID NO: 818 - protein, 72 aa, synthetic construct
  REGION 1..72: note = Description of Artificial Sequence: Synthetic polypeptide
GGSGGSPAPAPAPAPAPAPAPAPAPAPAPAPAPAPAPAPAPAPAPAPAPAPAPAPAPAPAPAPAPAGGSGGS

SEQ ID NO: 819 - protein, 600 aa, synthetic construct
  REGION 1..600: note = Description of Artificial Sequence: Synthetic polypeptide
  VARIANT 1..150: note = GGS repeats may be deleted
  VARIANT 151..350: note = PAPA repeats may be deleted
  VARIANT 351..600: note = PSGGS repeats may be deleted
GGSGGSGGSGGSGGSGGSGGSGGSGGSGGSGGSGGSGGSGGSGGSGGSGGSGGSGGSGGSGGSGGSGGSGGSGGSGGSGGSGGSGGSGGSGGSGGSGGSGGSGGSGGSGGSGGSGGSGGSGGSGGSGGSGGSGGSGGSGGSGGSGGSGGSPAPAPAPAPAPAPAPAPAPAPAPAPAPAPAPAPAPAPAPAPAPAPAPAPAPAPAPAPAPAPAPAPAPAPAPAPAPAPAPAPAPAPAPAPAPAPAPAPAPAPAPAPAPAPAPAPAPAPAPAPAPAPAPAPAPAPAPAPAPAPAPAPAPAPAPAPAPAPAPAPAPAPAPAPAPAPAPAPAPAPAPAPAPAPAPAPAPAPAPAPSGGSPSGGSPSGGSPSGGSPSGGSPSGGSPSGGSPSGGSPSGGSPSGGSPSGGSPSGGSPSGGSPSGGSPSGGSPSGGSPSGGSPSGGSPSGGSPSGGSPSGGSPSGGSPSGGSPSGGSPSGGSPSGGSPSGGSPSGGSPSGGSPSGGSPSGGSPSGGSPSGGSPSGGSPSGGSPSGGSPSGGSPSGGSPSGGSPSGGSPSGGSPSGGSPSGGSPSGGSPSGGSPSGGSPSGGSPSGGSPSGGSPSGGS

SEQ ID NO: 820 - protein, 12 aa, synthetic construct
  REGION 1..12: note = Description of Artificial Sequence: Synthetic peptide
GGSPAPAPSGGS

SEQ ID NO: 821 - protein, 16 aa, synthetic construct
  REGION 1..16: note = Description of Artificial Sequence: Synthetic peptide
GGSPAPAPAPAPSGGS

SEQ ID NO: 822 - protein, 20 aa, synthetic construct
  REGION 1..20: note = Description of Artificial Sequence: Synthetic peptide
GGSPAPAPAPAPAPAPSGGS

SEQ ID NO: 823 - protein, 24 aa, synthetic construct
  REGION 1..24: note = Description of Artificial Sequence: Synthetic peptide
GGSPAPAPAPAPAPAPAPAPSGGS

SEQ ID NO: 824 - protein, 28 aa, synthetic construct
  REGION 1..28: note = Description of Artificial Sequence: Synthetic peptide
GGSPAPAPAPAPAPAPAPAPAPAPSGGS

SEQ ID NO: 825 - protein, 32 aa, synthetic construct; identical to SEQ ID NO: 373
  REGION 1..32: note = Description of Artificial Sequence: Synthetic polypeptide

SEQ ID NO: 826 - protein, 36 aa, synthetic construct
  REGION 1..36: note = Description of Artificial Sequence: Synthetic polypeptide
GGSPAPAPAPAPAPAPAPAPAPAPAPAPAPAPSGGS

SEQ ID NO: 827 - protein, 40 aa, synthetic construct; identical to SEQ ID NO: 372
  REGION 1..40: note = Description of Artificial Sequence: Synthetic polypeptide

SEQ ID NO: 828 - protein, 44 aa, synthetic construct
  REGION 1..44: note = Description of Artificial Sequence: Synthetic polypeptide
GGSPAPAPAPAPAPAPAPAPAPAPAPAPAPAPAPAPAPAPSGGS

SEQ ID NO: 829 - protein, 48 aa, synthetic construct
  REGION 1..48: note = Description of Artificial Sequence: Synthetic polypeptide
GGSPAPAPAPAPAPAPAPAPAPAPAPAPAPAPAPAPAPAPAPAPSGGS

SEQ ID NO: 830 - protein, 52 aa, synthetic construct
  REGION 1..52: note = Description of Artificial Sequence: Synthetic polypeptide
GGSPAPAPAPAPAPAPAPAPAPAPAPAPAPAPAPAPAPAPAPAPAPAPSGGS

SEQ ID NO: 831 - protein, 56 aa, synthetic construct
  REGION 1..56: note = Description of Artificial Sequence: Synthetic polypeptide
GGSPAPAPAPAPAPAPAPAPAPAPAPAPAPAPAPAPAPAPAPAPAPAPAPAPSGGS

SEQ ID NO: 832 - protein, 60 aa, synthetic construct
  REGION 1..60: note = Description of Artificial Sequence: Synthetic polypeptide
GGSPAPAPAPAPAPAPAPAPAPAPAPAPAPAPAPAPAPAPAPAPAPAPAPAPAPAPSGGS

SEQ ID NO: 833 - protein, 64 aa, synthetic construct
  REGION 1..64: note = Description of Artificial Sequence: Synthetic polypeptide
GGSPAPAPAPAPAPAPAPAPAPAPAPAPAPAPAPAPAPAPAPAPAPAPAPAPAPAPAPAPSGGS

SEQ ID NO: 834 - protein, 68 aa, synthetic construct
  REGION 1..68: note = Description of Artificial Sequence: Synthetic polypeptide
GGSPAPAPAPAPAPAPAPAPAPAPAPAPAPAPAPAPAPAPAPAPAPAPAPAPAPAPAPAPAPAPSGGS

SEQ ID NO: 835 - protein, 900 aa, synthetic construct
  REGION 1..900: note = Description of Artificial Sequence: Synthetic polypeptide
  VARIANT 19..900: note = KRTADGSEFESPKKKRKV repeats may be deleted
KRTADGSEFESPKKKRKVKRTADGSEFESPKKKRKVKRTADGSEFESPKKKRKVKRTADGSEFESPKKKRKVKRTADGSEFESPKKKRKVKRTADGSEFESPKKKRKVKRTADGSEFESPKKKRKVKRTADGSEFESPKKKRKVKRTADGSEFESPKKKRKVKRTADGSEFESPKKKRKVKRTADGSEFESPKKKRKVKRTADGSEFESPKKKRKVKRTADGSEFESPKKKRKVKRTADGSEFESPKKKRKVKRTADGSEFESPKKKRKVKRTADGSEFESPKKKRKVKRTADGSEFESPKKKRKVKRTADGSEFESPKKKRKVKRTADGSEFESPKKKRKVKRTADGSEFESPKKKRKVKRTADGSEFESPKKKRKVKRTADGSEFESPKKKRKVKRTADGSEFESPKKKRKVKRTADGSEFESPKKKRKVKRTADGSEFESPKKKRKVKRTADGSEFESPKKKRKVKRTADGSEFESPKKKRKVKRTADGSEFESPKKKRKVKRTADGSEFESPKKKRKVKRTADGSEFESPKKKRKVKRTADGSEFESPKKKRKVKRTADGSEFESPKKKRKVKRTADGSEFESPKKKRKVKRTADGSEFESPKKKRKVKRTADGSEFESPKKKRKVKRTADGSEFESPKKKRKVKRTADGSEFESPKKKRKVKRTADGSEFESPKKKRKVKRTADGSEFESPKKKRKVKRTADGSEFESPKKKRKVKRTADGSEFESPKKKRKVKRTADGSEFESPKKKRKVKRTADGSEFESPKKKRKVKRTADGSEFESPKKKRKVKRTADGSEFESPKKKRKVKRTADGSEFESPKKKRKVKRTADGSEFESPKKKRKVKRTADGSEFESPKKKRKVKRTADGSEFESPKKKRKVKRTADGSEFESPKKKRKV

SEQ ID NO: 836 - protein, 8 aa, synthetic construct
  REGION 1..8: note = Description of Artificial Sequence: Synthetic polypeptide
RRRRRRRR

SEQ ID NO: 837 - protein, 1450 aa, synthetic construct
  REGION 1..1450: note = Description of Artificial Sequence: Synthetic polypeptide
  VARIANT 30..1450: note = PAAKRVKLDGGKRTADGSEFESPKKKRKV repeats may be deleted
PAAKRVKLDGGKRTADGSEFESPKKKRKVPAAKRVKLDGGKRTADGSEFESPKKKRKVPAAKRVKLDGGKRTADGSEFESPKKKRKVPAAKRVKLDGGKRTADGSEFESPKKKRKVPAAKRVKLDGGKRTADGSEFESPKKKRKVPAAKRVKLDGGKRTADGSEFESPKKKRKVPAAKRVKLDGGKRTADGSEFESPKKKRKVPAAKRVKLDGGKRTADGSEFESPKKKRKVPAAKRVKLDGGKRTADGSEFESPKKKRKVPAAKRVKLDGGKRTADGSEFESPKKKRKVPAAKRVKLDGGKRTADGSEFESPKKKRKVPAAKRVKLDGGKRTADGSEFESPKKKRKVPAAKRVKLDGGKRTADGSEFESPKKKRKVPAAKRVKLDGGKRTADGSEFESPKKKRKVPAAKRVKLDGGKRTADGSEFESPKKKRKVPAAKRVKLDGGKRTADGSEFESPKKKRKVPAAKRVKLDGGKRTADGSEFESPKKKRKVPAAKRVKLDGGKRTADGSEFESPKKKRKVPAAKRVKLDGGKRTADGSEFESPKKKRKVPAAKRVKLDGGKRTADGSEFESPKKKRKVPAAKRVKLDGGKRTADGSEFESPKKKRKVPAAKRVKLDGGKRTADGSEFESPKKKRKVPAAKRVKLDGGKRTADGSEFESPKKKRKVPAAKRVKLDGGKRTADGSEFESPKKKRKVPAAKRVKLDGGKRTADGSEFESPKKKRKVPAAKRVKLDGGKRTADGSEFESPKKKRKVPAAKRVKLDGGKRTADGSEFESPKKKRKVPAAKRVKLDGGKRTADGSEFESPKKKRKVPAAKRVKLDGGKRTADGSEFESPKKKRKVPAAKRVKLDGGKRTADGSEFESPKKKRKVPAAKRVKLDGGKRTADGSEFESPKKKRKVPAAKRVKLDGGKRTADGSEFESPKKKRKVPAAKRVKLDGGKRTADGSEFESPKKKRKVPAAKRVKLDGGKRTADGSEFESPKKKRKVPAAKRVKLDGGKRTADGSEFESPKKKRKVPAAKRVKLDGGKRTADGSEFESPKKKRKVPAAKRVKLDGGKRTADGSEFESPKKKRKVPAAKRVKLDGGKRTADGSEFESPKKKRKVPAAKRVKLDGGKRTADGSEFESPKKKRKVPAAKRVKLDGGKRTADGSEFESPKKKRKVPAAKRVKLDGGKRTADGSEFESPKKKRKVPAAKRVKLDGGKRTADGSEFESPKKKRKVPAAKRVKLDGGKRTADGSEFESPKKKRKVPAAKRVKLDGGKRTADGSEFESPKKKRKVPAAKRVKLDGGKRTADGSEFESPKKKRKVPAAKRVKLDGGKRTADGSEFESPKKKRKVPAAKRVKLDGGKRTADGSEFESPKKKRKVPAAKRVKLDGGKRTADGSEFESPKKKRKVPAAKRVKLDGGKRTADGSEFESPKKKRKVPAAKRVKLDGGKRTADGSEFESPKKKRKV

SEQ ID NO: 838 - protein, 350 aa, synthetic construct
  REGION 1..350: note = Description of Artificial Sequence: Synthetic polypeptide
  VARIANT 8..350: note = PKKKRKV repeats may be deleted
PKKKRKVPKKKRKVPKKKRKVPKKKRKVPKKKRKVPKKKRKVPKKKRKVPKKKRKVPKKKRKVPKKKRKVPKKKRKVPKKKRKVPKKKRKVPKKKRKVPKKKRKVPKKKRKVPKKKRKVPKKKRKVPKKKRKVPKKKRKVPKKKRKVPKKKRKVPKKKRKVPKKKRKVPKKKRKVPKKKRKVPKKKRKVPKKKRKVPKKKRKVPKKKRKVPKKKRKVPKKKRKVPKKKRKVPKKKRKVPKKKRKVPKKKRKVPKKKRKVPKKKRKVPKKKRKVPKKKRKVPKKKRKVPKKKRKVPKKKRKVPKKKRKVPKKKRKVPKKKRKVPKKKRKVPKKKRKVPKKKRKVPKKKRKV

SEQ ID NO: 839 - protein, 1450 aa, synthetic construct
  REGION 1..1450: note = Description of Artificial Sequence: Synthetic polypeptide
  VARIANT 30..1450: note = KRTADSQHSTPPKTKRKV- EFES-PKKKRKV repeats may be deleted
KRTADSQHSTPPKTKRKVEFESPKKKRKVKRTADSQHSTPPKTKRKVEFESPKKKRKVKRTADSQHSTPPKTKRKVEFESPKKKRKVKRTADSQHSTPPKTKRKVEFESPKKKRKVKRTADSQHSTPPKTKRKVEFESPKKKRKVKRTADSQHSTPPKTKRKVEFESPKKKRKVKRTADSQHSTPPKTKRKVEFESPKKKRKVKRTADSQHSTPPKTKRKVEFESPKKKRKVKRTADSQHSTPPKTKRKVEFESPKKKRKVKRTADSQHSTPPKTKRKVEFESPKKKRKVKRTADSQHSTPPKTKRKVEFESPKKKRKVKRTADSQHSTPPKTKRKVEFESPKKKRKVKRTADSQHSTPPKTKRKVEFESPKKKRKVKRTADSQHSTPPKTKRKVEFESPKKKRKVKRTADSQHSTPPKTKRKVEFESPKKKRKVKRTADSQHSTPPKTKRKVEFESPKKKRKVKRTADSQHSTPPKTKRKVEFESPKKKRKVKRTADSQHSTPPKTKRKVEFESPKKKRKVKRTADSQHSTPPKTKRKVEFESPKKKRKVKRTADSQHSTPPKTKRKVEFESPKKKRKVKRTADSQHSTPPKTKRKVEFESPKKKRKVKRTADSQHSTPPKTKRKVEFESPKKKRKVKRTADSQHSTPPKTKRKVEFESPKKKRKVKRTADSQHSTPPKTKRKVEFESPKKKRKVKRTADSQHSTPPKTKRKVEFESPKKKRKVKRTADSQHSTPPKTKRKVEFESPKKKRKVKRTADSQHSTPPKTKRKVEFESPKKKRKVKRTADSQHSTPPKTKRKVEFESPKKKRKVKRTADSQHSTPPKTKRKVEFESPKKKRKVKRTADSQHSTPPKTKRKVEFESPKKKRKVKRTADSQHSTPPKTKRKVEFESPKKKRKVKRTADSQHSTPPKTKRKVEFESPKKKRKVKRTADSQHSTPPKTKRKVEFESPKKKRKVKRTADSQHSTPPKTKRKVEFESPKKKRKVKRTADSQHSTPPKTKRKVEFESPKKKRKVKRTADSQHSTPPKTKRKVEFESPKKKRKVKRTADSQHSTPPKTKRKVEFESPKKKRKVKRTADSQHSTPPKTKRKVEFESPKKKRKVKRTADSQHSTPPKTKRKVEFESPKKKRKVKRTADSQHSTPPKTKRKVEFESPKKKRKVKRTADSQHSTPPKTKRKVEFESPKKKRKVKRTADSQHSTPPKTKRKVEFESPKKKRKVKRTADSQHSTPPKTKRKVEFESPKKKRKVKRTADSQHSTPPKTKRKVEFESPKKKRKVKRTADSQHSTPPKTKRKVEFESPKKKRKVKRTADSQHSTPPKTKRKVEFESPKKKRKVKRTADSQHSTPPKTKRKVEFESPKKKRKVKRTADSQHSTPPKTKRKVEFESPKKKRKVKRTADSQHSTPPKTKRKVEFESPKKKRKVKRTADSQHSTPPKTKRKVEFESPKKKRKV

SEQ ID NO: 840 - protein, 1400 aa, synthetic construct
  REGION 1..1400: note = Description of Artificial Sequence: Synthetic polypeptide
  VARIANT 29..1400: note = KRTADSQHSTPPKTKRKV- EFE-PKKKRKV repeats may be deleted
KRTADSQHSTPPKTKRKVEFEPKKKRKVKRTADSQHSTPPKTKRKVEFEPKKKRKVKRTADSQHSTPPKTKRKVEFEPKKKRKVKRTADSQHSTPPKTKRKVEFEPKKKRKVKRTADSQHSTPPKTKRKVEFEPKKKRKVKRTADSQHSTPPKTKRKVEFEPKKKRKVKRTADSQHSTPPKTKRKVEFEPKKKRKVKRTADSQHSTPPKTKRKVEFEPKKKRKVKRTADSQHSTPPKTKRKVEFEPKKKRKVKRTADSQHSTPPKTKRKVEFEPKKKRKVKRTADSQHSTPPKTKRKVEFEPKKKRKVKRTADSQHSTPPKTKRKVEFEPKKKRKVKRTADSQHSTPPKTKRKVEFEPKKKRKVKRTADSQHSTPPKTKRKVEFEPKKKRKVKRTADSQHSTPPKTKRKVEFEPKKKRKVKRTADSQHSTPPKTKRKVEFEPKKKRKVKRTADSQHSTPPKTKRKVEFEPKKKRKVKRTADSQHSTPPKTKRKVEFEPKKKRKVKRTADSQHSTPPKTKRKVEFEPKKKRKVKRTADSQHSTPPKTKRKVEFEPKKKRKVKRTADSQHSTPPKTKRKVEFEPKKKRKVKRTADSQHSTPPKTKRKVEFEPKKKRKVKRTADSQHSTPPKTKRKVEFEPKKKRKVKRTADSQHSTPPKTKRKVEFEPKKKRKVKRTADSQHSTPPKTKRKVEFEPKKKRKVKRTADSQHSTPPKTKRKVEFEPKKKRKVKRTADSQHSTPPKTKRKVEFEPKKKRKVKRTADSQHSTPPKTKRKVEFEPKKKRKVKRTADSQHSTPPKTKRKVEFEPKKKRKVKRTADSQHSTPPKTKRKVEFEPKKKRKVKRTADSQHSTPPKTKRKVEFEPKKKRKVKRTADSQHSTPPKTKRKVEFEPKKKRKVKRTADSQHSTPPKTKRKVEFEPKKKRKVKRTADSQHSTPPKTKRKVEFEPKKKRKVKRTADSQHSTPPKTKRKVEFEPKKKRKVKRTADSQHSTPPKTKRKVEFEPKKKRKVKRTADSQHSTPPKTKRKVEFEPKKKRKVKRTADSQHSTPPKTKRKVEFEPKKKRKVKRTADSQHSTPPKTKRKVEFEPKKKRKVKRTADSQHSTPPKTKRKVEFEPKKKRKVKRTADSQHSTPPKTKRKVEFEPKKKRKVKRTADSQHSTPPKTKRKVEFEPKKKRKVKRTADSQHSTPPKTKRKVEFEPKKKRKVKRTADSQHSTPPKTKRKVEFEPKKKRKVKRTADSQHSTPPKTKRKVEFEPKKKRKVKRTADSQHSTPPKTKRKVEFEPKKKRKVKRTADSQHSTPPKTKRKVEFEPKKKRKVKRTADSQHSTPPKTKRKVEFEPKKKRKVKRTADSQHSTPPKTKRKVEFEPKKKRKVKRTADSQHSTPPKTKRKVEFEPKKKRKV

SEQ ID NO: 841 - protein, 16 aa, Drosophila melanogaster
RQIKIWFQNRRMKWKK

SEQ ID NO: 842 - protein, 9 aa, synthetic construct
  REGION 1..9: note = Description of Artificial Sequence: Synthetic peptide
RRRRRRRRR

SEQ ID NO: 843 - protein, 200 aa, synthetic construct; identical to SEQ ID NO: 745
  REGION 1..200: note = Description of Artificial Sequence: Synthetic polypeptide
  VARIANT 5..200: note = GGSS repeats may be deleted

SEQ ID NO: 844 - protein, 250 aa, synthetic construct; identical to SEQ ID NO: 746
  REGION 1..250: note = Description of Artificial Sequence: Synthetic polypeptide
  VARIANT 6..250: note = EAAAK repeats may be deleted

SEQ ID NO: 845 - protein, 252 aa, synthetic construct
  REGION 1..252: note = Description of Artificial Sequence: Synthetic polypeptide
  VARIANT 7..251: note = EAAAK repeats may be deleted
AEAAAKEAAAKEAAAKEAAAKEAAAKEAAAKEAAAKEAAAKEAAAKEAAAKEAAAKEAAAKEAAAKEAAAKEAAAKEAAAKEAAAKEAAAKEAAAKEAAAKEAAAKEAAAKEAAAKEAAAKEAAAKEAAAKEAAAKEAAAKEAAAKEAAAKEAAAKEAAAKEAAAKEAAAKEAAAKEAAAKEAAAKEAAAKEAAAKEAAAKEAAAKEAAAKEAAAKEAAAKEAAAKEAAAKEAAAKEAAAKEAAAKEAAAKA

SEQ ID NO: 846 - protein, 7 aa, synthetic construct
  REGION 1..7: note = Description of Artificial Sequence: Synthetic polypeptide
AEAAAKA

SEQ ID NO: 847 - protein, 12 aa, synthetic construct
  REGION 1..12: note = Description of Artificial Sequence: Synthetic polypeptide
AEAAAKEAAAKA

SEQ ID NO: 848 - protein, 17 aa, synthetic construct
  REGION 1..17: note = Description of Artificial Sequence: Synthetic polypeptide
AEAAAKEAAAKEAAAKA

SEQ ID NO: 849 - protein, 22 aa, synthetic construct
  REGION 1..22: note = Description of Artificial Sequence: Synthetic polypeptide
AEAAAKEAAAKEAAAKEAAAKA

SEQ ID NO: 850 - protein, 27 aa, synthetic construct
  REGION 1..27: note = Description of Artificial Sequence: Synthetic polypeptide
AEAAAKEAAAKEAAAKEAAAKEAAAKA

SEQ ID NO: 851 - protein, 32 aa, synthetic construct
  REGION 1..32: note = Description of Artificial Sequence: Synthetic polypeptide
AEAAAKEAAAKEAAAKEAAAKEAAAKEAAAKA

SEQ ID NO: 852 - protein, 37 aa, synthetic construct
  REGION 1..37: note = Description of Artificial Sequence: Synthetic polypeptide
AEAAAKEAAAKEAAAKEAAAKEAAAKEAAAKEAAAKA

SEQ ID NO: 853 - protein, 42 aa, synthetic construct
  REGION 1..42: note = Description of Artificial Sequence: Synthetic polypeptide
AEAAAKEAAAKEAAAKEAAAKEAAAKEAAAKEAAAKEAAAKA

SEQ ID NO: 854 - protein, 47 aa, synthetic construct
  REGION 1..47: note = Description of Artificial Sequence: Synthetic polypeptide
AEAAAKEAAAKEAAAKEAAAKEAAAKEAAAKEAAAKEAAAKEAAAKA

SEQ ID NO: 855 - protein, 52 aa, synthetic construct
  REGION 1..52: note = Description of Artificial Sequence: Synthetic polypeptide
AEAAAKEAAAKEAAAKEAAAKEAAAKEAAAKEAAAKEAAAKEAAAKEAAAKA

SEQ ID NO: 856 - protein, 57 aa, synthetic construct
  REGION 1..57: note = Description of Artificial Sequence: Synthetic polypeptide
AEAAAKEAAAKEAAAKEAAAKEAAAKEAAAKEAAAKEAAAKEAAAKEAAAKEAAAKA

SEQ ID NO: 857 - protein, 62 aa, synthetic construct
  REGION 1..62: note = Description of Artificial Sequence: Synthetic polypeptide
AEAAAKEAAAKEAAAKEAAAKEAAAKEAAAKEAAAKEAAAKEAAAKEAAAKEAAAKEAAAKA

SEQ ID NO: 858 - protein, 67 aa, synthetic construct
  REGION 1..67: note = Description of Artificial Sequence: Synthetic polypeptide
AEAAAKEAAAKEAAAKEAAAKEAAAKEAAAKEAAAKEAAAKEAAAKEAAAKEAAAKEAAAKEAAAKA

SEQ ID NO: 859 - protein, 72 aa, synthetic construct
  REGION 1..72: note = Description of Artificial Sequence: Synthetic polypeptide
AEAAAKEAAAKEAAAKEAAAKEAAAKEAAAKEAAAKEAAAKEAAAKEAAAKEAAAKEAAAKEAAAKEAAAKA

SEQ ID NO: 860 - protein, 77 aa, synthetic construct
  REGION 1..77: note = Description of Artificial Sequence: Synthetic polypeptide
AEAAAKEAAAKEAAAKEAAAKEAAAKEAAAKEAAAKEAAAKEAAAKEAAAKEAAAKEAAAKEAAAKEAAAKEAAAKA

SEQ ID NO: 861 - protein, 82 aa, synthetic construct
  REGION 1..82: note = Description of Artificial Sequence: Synthetic polypeptide
AEAAAKEAAAKEAAAKEAAAKEAAAKEAAAKEAAAKEAAAKEAAAKEAAAKEAAAKEAAAKEAAAKEAAAKEAAAKEAAAKA

SEQ ID NO: 862 - protein, 87 aa, synthetic construct
  REGION 1..87: note = Description of Artificial Sequence: Synthetic polypeptide
AEAAAKEAAAKEAAAKEAAAKEAAAKEAAAKEAAAKEAAAKEAAAKEAAAKEAAAKEAAAKEAAAKEAAAKEAAAKEAAAKEAAAKA

SEQ ID NO: 863 - protein, 92 aa, synthetic construct
  REGION 1..92: note = Description of Artificial Sequence: Synthetic polypeptide
AEAAAKEAAAKEAAAKEAAAKEAAAKEAAAKEAAAKEAAAKEAAAKEAAAKEAAAKEAAAKEAAAKEAAAKEAAAKEAAAKEAAAKEAAAKA

SEQ ID NO: 864 - protein, 97 aa, synthetic construct
  REGION 1..97: note = Description of Artificial Sequence: Synthetic polypeptide
AEAAAKEAAAKEAAAKEAAAKEAAAKEAAAKEAAAKEAAAKEAAAKEAAAKEAAAKEAAAKEAAAKEAAAKEAAAKEAAAKEAAAKEAAAKEAAAKA

SEQ ID NO: 865 - protein, 102 aa, synthetic construct
  REGION 1..102: note = Description of Artificial Sequence: Synthetic polypeptide
AEAAAKEAAAKEAAAKEAAAKEAAAKEAAAKEAAAKEAAAKEAAAKEAAAKEAAAKEAAAKEAAAKEAAAKEAAAKEAAAKEAAAKEAAAKEAAAKEAAAKA

SEQ ID NO: 866 - protein, 258 aa, synthetic construct
  REGION 1..258: note = Description of Artificial Sequence: Synthetic polypeptide
SGGSEAAAKEAAAKEAAAKEAAAKEAAAKEAAAKEAAAKEAAAKEAAAKEAAAKEAAAKEAAAKEAAAKEAAAKEAAAKEAAAKEAAAKEAAAKEAAAKEAAAKEAAAKEAAAKEAAAKEAAAKEAAAKEAAAKEAAAKEAAAKEAAAKEAAAKEAAAKEAAAKEAAAKEAAAKEAAAKEAAAKEAAAKEAAAKEAAAKEAAAKEAAAKEAAAKEAAAKEAAAKEAAAKEAAAKEAAAKEAAAKEAAAKEAAAKSGGS

SEQ ID NO: 867 - protein, 13 aa, synthetic construct
  REGION 1..13: note = Description of Artificial Sequence: Synthetic polypeptide
SGGSEAAAKSGGS

SEQ ID NO: 868 - protein, 33 aa, synthetic construct
  REGION 1..33: note = Description of Artificial Sequence: Synthetic polypeptide
SGGSEAAAKEAAAKEAAAKEAAAKEAAAKSGGS

SEQ ID NO: 869 - protein, 43 aa, synthetic construct
  REGION 1..43: note = Description of Artificial Sequence: Synthetic polypeptide
SGGSEAAAKEAAAKEAAAKEAAAKEAAAKEAAAKEAAAKSGGS

SEQ ID NO: 870 - protein, 53 aa, synthetic construct
  REGION 1..53: note = Description of Artificial Sequence: Synthetic polypeptide
SGGSEAAAKEAAAKEAAAKEAAAKEAAAKEAAAKEAAAKEAAAKEAAAKSGGS

SEQ ID NO: 871 - protein, 58 aa, synthetic construct
  REGION 1..58: note = Description of Artificial Sequence: Synthetic polypeptide
SGGSEAAAKEAAAKEAAAKEAAAKEAAAKEAAAKEAAAKEAAAKEAAAKEAAAKSGGS

SEQ ID NO: 872 - protein, 63 aa, synthetic construct
  REGION 1..63: note = Description of Artificial Sequence: Synthetic polypeptide
SGGSEAAAKEAAAKEAAAKEAAAKEAAAKEAAAKEAAAKEAAAKEAAAKEAAAKEAAAKSGGS

SEQ ID NO: 873 - protein, 68 aa, synthetic construct
  REGION 1..68: note = Description of Artificial Sequence: Synthetic polypeptide
SGGSEAAAKEAAAKEAAAKEAAAKEAAAKEAAAKEAAAKEAAAKEAAAKEAAAKEAAAKEAAAKSGGS

SEQ ID NO: 874 - protein, 73 aa, synthetic construct
  REGION 1..73: note = Description of Artificial Sequence: Synthetic polypeptide
SGGSEAAAKEAAAKEAAAKEAAAKEAAAKEAAAKEAAAKEAAAKEAAAKEAAAKEAAAKEAAAKEAAAKSGGS

SEQ ID NO: 875 - protein, 78 aa, synthetic construct
  REGION 1..78: note = Description of Artificial Sequence: Synthetic polypeptide
SGGSEAAAKEAAAKEAAAKEAAAKEAAAKEAAAKEAAAKEAAAKEAAAKEAAAKEAAAKEAAAKEAAAKEAAAKSGGS

SEQ ID NO: 876 - protein, 83 aa, synthetic construct
  REGION 1..83: note = Description of Artificial Sequence: Synthetic polypeptide
SGGSEAAAKEAAAKEAAAKEAAAKEAAAKEAAAKEAAAKEAAAKEAAAKEAAAKEAAAKEAAAKEAAAKEAAAKEAAAKSGGS

SEQ ID NO: 877 - protein, 88 aa, synthetic construct
  REGION 1..88: note = Description of Artificial Sequence: Synthetic polypeptide
SGGSEAAAKEAAAKEAAAKEAAAKEAAAKEAAAKEAAAKEAAAKEAAAKEAAAKEAAAKEAAAKEAAAKEAAAKEAAAKEAAAKSGGS

SEQ ID NO: 878 - protein, 93 aa, synthetic construct
  REGION 1..93: note = Description of Artificial Sequence: Synthetic polypeptide
SGGSEAAAKEAAAKEAAAKEAAAKEAAAKEAAAKEAAAKEAAAKEAAAKEAAAKEAAAKEAAAKEAAAKEAAAKEAAAKEAAAKEAAAKSGGS

SEQ ID NO: 879 - protein, 98 aa, synthetic construct
  REGION 1..98: note = Description of Artificial Sequence: Synthetic polypeptide
SGGSEAAAKEAAAKEAAAKEAAAKEAAAKEAAAKEAAAKEAAAKEAAAKEAAAKEAAAKEAAAKEAAAKEAAAKEAAAKEAAAKEAAAKEAAAKSGGS

SEQ ID NO: 880 - protein, 103 aa, synthetic construct
  REGION 1..103: note = Description of Artificial Sequence: Synthetic polypeptide
SGGSEAAAKEAAAKEAAAKEAAAKEAAAKEAAAKEAAAKEAAAKEAAAKEAAAKEAAAKEAAAKEAAAKEAAAKEAAAKEAAAKEAAAKEAAAKEAAAKSGGS

SEQ ID NO: 881 - protein, 108 aa, synthetic construct
  REGION 1..108: note = Description of Artificial Sequence: Synthetic polypeptide
SGGSEAAAKEAAAKEAAAKEAAAKEAAAKEAAAKEAAAKEAAAKEAAAKEAAAKEAAAKEAAAKEAAAKEAAAKEAAAKEAAAKEAAAKEAAAKEAAAKEAAAKSGGS

SEQ ID NO: 882 - protein, 8 aa, synthetic construct
  REGION 1..8: note = Description of Artificial Sequence: Synthetic polypeptide
SGGSSGGS

SEQ ID NO: 883 - protein, 12 aa, synthetic construct
  REGION 1..12: note = Description of Artificial Sequence: Synthetic polypeptide
SGGSSGGSSGGS

SEQ ID NO: 884 - protein, 28 aa, synthetic construct
  REGION 1..28: note = Description of Artificial Sequence: Synthetic polypeptide
SGGSSGGSSGGSSGGSSGGSSGGSSGGS

SEQ ID NO: 885 - protein, 36 aa, synthetic construct
  REGION 1..36: note = Description of Artificial Sequence: Synthetic polypeptide
SGGSSGGSSGGSSGGSSGGSSGGSSGGSSGGSSGGS

SEQ ID NO: 886 - protein, 56 aa, synthetic construct
  REGION 1..56: note = Description of Artificial Sequence: Synthetic polypeptide
SGGSSGGSSGGSSGGSSGGSSGGSSGGSSGGSSGGSSGGSSGGSSGGSSGGSSGGS

SEQ ID NO: 887 - protein, 60 aa, synthetic construct
  REGION 1..60: note = Description of Artificial Sequence: Synthetic polypeptide
SGGSSGGSSGGSSGGSSGGSSGGSSGGSSGGSSGGSSGGSSGGSSGGSSGGSSGGSSGGS

SEQ ID NO: 888 - protein, 64 aa, synthetic construct
  REGION 1..64: note = Description of Artificial Sequence: Synthetic polypeptide
SGGSSGGSSGGSSGGSSGGSSGGSSGGSSGGSSGGSSGGSSGGSSGGSSGGSSGGSSGGSSGGS

SEQ ID NO: 889 - protein, 68 aa, synthetic construct
  REGION 1..68: note = Description of Artificial Sequence: Synthetic polypeptide
SGGSSGGSSGGSSGGSSGGSSGGSSGGSSGGSSGGSSGGSSGGSSGGSSGGSSGGSSGGSSGGSSGGS

SEQ ID NO: 890 - protein, 72 aa, synthetic construct
  REGION 1..72: note = Description of Artificial Sequence: Synthetic polypeptide
SGGSSGGSSGGSSGGSSGGSSGGSSGGSSGGSSGGSSGGSSGGSSGGSSGGSSGGSSGGSSGGSSGGSSGGS

SEQ ID NO: 891 - protein, 76 aa, synthetic construct
  REGION 1..76: note = Description of Artificial Sequence: Synthetic polypeptide
SGGSSGGSSGGSSGGSSGGSSGGSSGGSSGGSSGGSSGGSSGGSSGGSSGGSSGGSSGGSSGGSSGGSSGGSSGGS

SEQ ID NO: 892 - protein, 80 aa, synthetic construct
  REGION 1..80: note = Description of Artificial Sequence: Synthetic polypeptide
SGGSSGGSSGGSSGGSSGGSSGGSSGGSSGGSSGGSSGGSSGGSSGGSSGGSSGGSSGGSSGGSSGGSSGGSSGGSSGGS

SEQ ID NO: 893 - protein, 350 aa, synthetic construct; identical to SEQ ID NO: 653
  REGION 1..350: note = Description of Artificial Sequence: Synthetic polypeptide

SEQ ID NO: 894 - protein, 32 aa, synthetic construct; identical to SEQ ID NO: 302
  REGION 1..32: note = Description of Artificial Sequence: Synthetic polypeptide
